United States Patent Application Publication US 2025/0092353 A1 - sequence listing, part 4

SEQ ID NO: 25 - DNA, 741042 bp, Kazachstania heterogenica
  source 1..741042: mol_type = genomic DNA
tttatagggggacctcttatttctctttctattccattccacatcattttgtcttatccttttcttcccaatctttcatctgcttatttcttactttccctcttagatcacttatctatgttctaacacctacataccctccttacctcactacttatcaccctgtaccaatctatcttttccctggagatatcccatcataatataaatatttacattctctctcatcatatttcctatatttccatacatctcctcatctactctactacttctcttccctcatttacctatttttacaacatctatactcatccctactctcctattctcacacaccaatactctgtaagagttgttatatgtaaatggatgaattgtactgattagtataagtataaacactcttactcaagttctatatattactaattaatgaccctaatgttgtattattccttcttctttttttgtatgatattaaagttgccccctaatattcttactaagatgtatttaaataagatgagtacccctgacatatctcttaataatcaaaggcctcttaacaaaatccgatataactatcactctctggaaatcctccaatagacaaacttacaatattagccataagaagaattcttacatccttcaattccaaatatacaagggaaaataatgctttatatttgttattcactacatatttaaagatattaaaaactttaaattattattttaatagaatctttggtccttctgttattgacattaataaagagatcacttaaaagctatcacaacatagttgtaactgtcttaccagtatcaacaatgattagtaattcattatttttcctaggtcttgtttttactaaagcttataatataacatcacaaccctcttaatatatgtcttttacattcctcgttcttaatcctatttctatatatcaagtataaagaaaaactaagcaaaaaaagaaaactaacgccataaatagtatcttaaactaatctgtttttttcttgattgttaagtatgtaaagcgattcataccatgcaaggaacacaacagctgaaaaattgcacatgatataaaactcaaaacatagtcgtttagaacatgatgtatatatattttttgaaatctgaagttcattttttttacaatgaatccaaaaatcaaattaacattgttaaatcttatgtacgtcgtctcagttggaattacataagaagtattgaatatataaagataaacaatgttaattctgctgttaactattctcttgtgactgcgcacaaatattgttctatctttttattttaagaatgaaaaaatttaattaggcttacagaaaaagcaagtagataaagaagacaggccattattaagttatcttgacaacatctgctacttttgagatatgaagttgccgaaccgttttctacaaaccctacctctaaataaagatgaaagctagaaaaacccagaatattatttcatgcccgatttttatcatgttagtacgatataggtatatatgtctttttgtgttctatttttaaatttttgtccctgaattattttaaagaactcccacccctataatttcaaaaacacctcatgttagcacaaccttgtttaatacatatatcggttctattcaaatattatgaagatacaatagcaactcttactaatcaacactatctgcatgacgaattttcagtaaccaaaacacaacttggcattattgtaattttctgaaaaacagaatgaagaatttttatatctccaaagaagtaccatctatatttgtaatgtgaattcaaattggtggtgctgtatcaaaataaaaaaaattggaagtattagaaaaaattgattattaaaactacacatttgtgttaatattcccttcatgtagctaacatgtctacacgatatagctggtacaatatagtgttatagatattgtaagactttttagaagcaagatagaaaaaataccatggaacggtgggtttgcttttttttgctttataacaggcaaaaaatgtacacaaaaagacaaacacaacgtttttgaaaattttttctcatctattattgtttatgtttagctaactcaactttttcctttttttcataaaaaaattttttgcttgtacgttccagtaaaacagaaaaacatgctcttgtcatgtaaacgcatattcagaccaattaccacagcaacctcatttcacttttcaattattctgtagtaacaaaagcaaagaaaacttttggcaaaagtaaaaatacttaatactaatttctaaccagttaaattttgtctacatttggacaattttttatctgattgtttaacttttttagggtaaaaaatcacaacaagtttgattgttcaactcttcttctatcaaacgagggattgaatatagttttgcaactcgacaaagaaactaattttctgcttgaacccatatcaagatgaattaattatattttcctgttttaatatgaatatattaagtaagtagaaaaaacaagttattatcttctttaagaaggttattcttcagtatttatctaatctatagcatttatttgttggaatgtactttgtttaattccacgagcaaaatgaccaacaaagtttatttctttttttagttagcaaccgtcctagagtgattgtttttattttttgtcccaaggacttgtgttaggttttattttttaaattgtaagtcaattctttacaaaagccatagaactttagggttgtttttaaattgtcatttttagacatattacgaaacttaggaataaaaatacctcacttcagttactaacagaaatattcctaaatactactacaagaagatgctttggacaacaataaatcccataatctaaaaaaaaacatgcttaaaaatagttcattgtatactatctattatagttattccattcaaccaccaattggcaaacaaaaaacaaaaagaaatgctctgttatcaagtcttgctattttgaaaagatacaaacttcctatcatcctttgacctagtataaataaacaacatcataacaataggtcgaatataataataattatctttttttcttgtttgtcttaaaattaaaccaaatagctatcattaaactacattgtaaaagattttaaggattccacaaggtatacgtcattttttctagcttaatagtactcttgcatgtcttacatattgtgtatccgaaaaggagaaaaaatactccacctaaatggagaattttgaattttacaaattatattgttcttatactagatcagaaaaaagagaaaaaatcggaaataggaatatcacactaaaaagtctaattgagatccaaatctgccaggagaataattatattttagatctttatcataatagatgttctaatagaacaataataactttaaataataaattcttggttaacaaaagaacaattttactacatttgttgaatattataaaaaatattactacatgctaacgtcatataaggtgctgattcttgcaatacgaactaaaaaaagaaaaaaaattgttgatggttcttatagtgtataactttatataacttatgtacaaacagtaacaatgcaataaaaattctttaccccttttttaaattatacattcctattcgatcccacggtcactgccaaaaatgttaatattttattgtgaatgaagtaataaattttgtacattctatagatcgatttactatagaatattgtgatatgtataaaagagatataaatgccaaataactaattaatcaggggcgatgatcctgtaagagtggggattctctaaaataattcaggggcaaaaattcaaaaatagaacacaaagagacatgtatatctatagtgtggtcagaattgtctgtattgtctcttttcccacttgtgtaatttttttcttcacttttattctttttgtcattgcatcaaatacaaagacgattgtttccaacacaatagcaaaaaaggaaaaaaactatttgtccattcttaaacttgtaagctttcccttttatgtttttcaaaagtaaaatatctagacaaaactgattctattgttctgcaatgtgaaaattcccaaacaataaacaatatttttaattctatatttggaaaggttttcgaggactcaacattttctgtttccttttttgtttaaagaaactaccacacagtgatatttttcctattagagataataaaatgatcagctatgctgtgtttttgtgctttacttagatttttagtccaatttttgaagattacaaatcttcttcttcattctttgtttctactcctttacacacttttatcattgaagatttattgcaaaactttatttatatcttattctggttcagtcaaaaatttagaacctattagacgatcatttttattgcaagtcatgagcacatttttatataaaactactatggattatgtctgaatattctttcgtttcttgcttctcttcttgcaggcatgagcatcatctcgttatactcccagatgctaccagtataaccgaactaagtgaatcacctcaaataaccaaaaaaactaacgccataaagtatacacaccaaactatatattttactgaaaagtcaataattctgaatatttgaaaataatataatggtctcaagtgccttatcattgtgcgcggcactgcttttagctgctttttctgctgtatcgaaggcacaagtatcttatgctgttactacttatgctgcaccagtttctgattattggaatccggctactattgaaggtgaaggtcctattgtaacagtggacagaataatttttaataatccgtataatgcatctaatgatgctaagtgtttgttgacaccagagcaacaggctgctgttctggaggcaactaataagtacagatctatgtttgttgacactcctaatttgacctggtctgatgctttagccaaacgggctgcgtggtgggcttgcaaatttgatgtatacaaggacattccagaagaccctccagattacgactacaatattggtaaaagcatgtacgcaggagctgctgctaatccagtcggtgctgtagacatgtggtttgatgaaattaatagttataattacagccatcctggcttttcctggccaactgtacattttacacagcttgtttggagatccaccacagaggttggttgtgctgcaaatttattttggcccgcttttgacggttcgcccaatcaatactttgttgtgtgtcagtacttacctgctggtaatatgtttggtcaattccctgaaaatgttatgcctctgaaaccagcttataaaagtcttcattggtcaacaattcattcggcaaccgcccccataaattggacatctatgtctctatatcaaaaaacacatactgtagctccaattactataactccgacatcaaatcctaaccctgtttacacaataccttttggagattggtcaaacttttttccatcaacagcccagataacttatataagtgccactgacagctcaaccaccactgcaacaacaactgcttcgaaaaacggtcatagttctggtatcgatgctactgaaagatcaaccactacttctaaaaaatctgcctctagcaacagtcataattctgctattgatgctattaacagatcaaccatcacttctaaaaaatctacctcgagtaacagtcatagttctgctattgataccactgacagatcaatcatcacttccaagaaatctacctcgagtaacagtcatagttctgctattgataccactgacagatcaatcatcacttccaagaaatctacttcaagtaacagtcatagttctgctatggatgctaatggcaattcaaccactacttctaagaaatctacttcaaacagtcatgcttctactatggatgctactaacagatcaaccatcacttccaagagatctacctctagcaacagtaatggttctgctatgaataatactgacagatcgaccaccacttctaaaaaatctacctcaatcagtcatggttctactattgatgctactgacaaatcaactaccactgcaacaacatctgcctctagcaacagtcatggttctgctattgatgctactgacagatcaactaccacttctaaaaaatctacctcaaacagtcatagttctgctatgaatactactaacagatcaaccatcacttctacctctagcaacagtcatggttctactatggatgctattaacagattaaccatcacttctagcaaatctacctctagcaatagtaatggttctgctattgatgccactgacagatccactgctacttctgacaaatctatctcaatcagtcatggttctactattgatgctattcacagatcaatcaccacttctaagaaatctgcctcaatcagtcatagttctactatagatgctacggacagatcaaccatcacttctaaaaactctgcctcaatcagtcataattctgctattgatgctactgacagatcgaccaccacttctaacaaatctacctcaatcagtcataattctgctattgatgctactgacagatcaactaccacttctaaaaaatctacctcaaacagtcatagttctgctatgaatactactaacagatcaaccatcacttctacctctagcaacagtcatggttctgctatggatgctactaacagttcaaccatcacttctaagaaatctacttcaagcaacagtaatggttctactatgaatactactgacagatcaactaccatttctaaaaaatctacctcaatcagtcatagttctgttgttgatgctactgacagatccactgctacttctgacaaatctatctcaatcagtcatggttctactattgatgctattcacagatcaatcaccacttctaagaaatctgcctcaaacagtcatagttctactatggatgctactgacagatcaaccatcacttctaacaaatctacctcaatcagtcataattctgctattgatgctactgacagatcaactaccacttctaaaaaatctacctcaaacagtcatagttctgctatgaatactactaacagatcaaccatcacttctacctctagcaacagtcatggttctattattgatgctactcacagatcaaccaccacttctaacaaatctacctcgagtaacagtcatagttctgctatagataccactgacagatcaactaccacttctaaaaaatctacctcaatcagtcatggttctagtatagatgccactgacagatcaactaccacttcgaagaaatctacctcaagcaacagtcatggttctgctatagatgctactaacagatcaaccactacttctaacaaatctgtctcaatcagtcatagttctactatagatgctactgacagatcagctactactgcaacaacatctaccccaagcagcagtcgtggttctgctattgatgctactgacagatcaaccatcacttctaacaaatctacttcaatcagtcatagttctgctgttgatgctactagcagatcaactaccacttctaagaaatctacttcaagcaagagtaatggttctactatggatgctactaacagctcaaccatcacttttaagaaatctacttcaatcagtcatagttctgctgtggatgctactgacagatcagctactactgcaacaacatctaccccaagcagcagtcgtggttctgctattgatgctactgacagatcaaccatcacttctaacaaatctacttcaatcagtcatagttctgctgttgatgctactagcagatcaactaccacttctaagaaatctacttcaagcaagagtaatggttctactatggatgctactaacagctcaaccactacttctaacaaatctgtctcaatcagtcatagttctactatagatgctactgacagatcagctactactgcaacaacatctaccccaagcagcagtcgtggttctgctattgatgctactgacagatcaaccatcacttctagcaaatctacttcaatcagtcatagttctgctatgaatactactcacagatcaaccatcacttctaaaaaatctacttcaatcagtcatggttctactatgaatactactgacagatcaaccatcatttctaacaagtctacttcaatcagtcatggttctgctatggatgctactgacagatcaaccatcatttctaacaagtctacttcaatcagtcatggttctgctatggatgctactgacagatcaaccatcatttctaacaagtctacttcaatcagtcatggttctgctattgatgctactcacagatcaagtgccacttctaacaaatctacctcaaacagtcatagttctactatggatgctactaacagatcaactaccacttctaaaagatctatctctagcaacaatcatagttctgttgttgatgctactgacagatcagctactactgcaacaacatctaccccaagcagcagtcgtggttctgctattgatgctactgaaagatcagccaccatttctaaaaaatctacctcgagtaacagtcatagttctactatgaatactactgacagatccacttctaacaaatctacctcaatcaatcatagttctactatgaatactactgacagatccacttctaaaaaatctacctcaataaatcatgcttctgctatgaatactactaacagatcaaccaccacttctaacaaatctgcctcaaacagtcatggttctagtatcaatgctactgacagatcaatcatcacttctaagaaatccacttcaaagagtcatagttctactatggatgctactaacagatcaacctccacttctaaaagatctatctctagcaacaatcatagttctgttgttgatgctactgacagatcagctactactgcaacaacatctaccccaagcagcagtcgtggttctgctattgatgctactgaaagatcaaccaccacagcaacaacatctactgattatactaaatatgcgttgactccagaagaacaggctgctgttgttctcgcacacaataagttgagagctttgcatgttgatactggtaatttgacctggtctaatactttagctgtatatgctgagaagtatgctgccgtttatgattgttcttctggtagacttgtgcactctcatggtccatacggtgaaaaccttgccctgggatttcctaatgcagtcgctgctgtggacgcctggtatagtgaaattgctcattataattacagccatcctggcttttccatggcaactggacattttacacaggttgtttggagatccaccaaggaggttggttgtgctgtaaaatattgtggcacctattaccgtgattatgttgtttgtgagtacgcacctcctggtaattatgaaggtgaattccctgaaaatgtcatgcctttgaaagcatctgtttcaagtagtagttccagtaaacctaagtcatcctctaccccttctgctacttcgaagaaatctatctcaagcaacagtaatggttctgctattgatgccactgacagatcaactaccactgcaacaatatctactttaaacagtaatggttctactatggatgctaataacagatcaaccttcacttctaagaaatctacttcaaacattcatggttctactatggatgctactgacagatcaaccaccactcctaacaaatctacctcaatcagtcatggttctgttattgatgctactgacagatctaccaccatttctaacaattctagttcaagcagcagtcgtggttctactatggatgctactgacaagtcaattgccactgcaacaacatctacctcaatcagtcatggttctgctattgatgctactgacagatcaatcatcacttccaagaaatctacctctagcaacagtcgtggttctgctatggatgctactcacagatcaacctccacttctgaaaaagctgcctctagcaacaatcgtagttctagtatcaatgctactcacagatcaacctccactgcaacaacatctgcctctagcaacagtcatggttctactatggatgctactgatagatcaaccatcacttctaagaaatctacttcaaacagtaatggttctgctatggatgctactgacagatcaactaccacttctaaaaaatctacctcaatcagtcatggttctagtatagatgccactgacagatctaccactacttctaagaaatctgtctcaatcagtcatagttctagtatagatgccactgacagatctaccactacttctaagaaatctgtctcaatcagtcatagttctactatagatgctacggacagatcaaccatcacttctaaaaactctgcctcaatcagtcataattctgctattgatgctactgacagatcaactgtcatttctaagaaatctacctcaatcagtcatagttctgctatggatgctactgatagatcaaccatttctgagaagtctacctcaatcagtcatagttctgctatgaatactactcacagatcaaccatcatttctaagaaatctacctcaatcagtcatagttctgctatggatgctactgacagatcaaccatcatttctaagaaatctacttcaatcagtcatggttctactatggatgctactaacagatcaaccatcacttctacctctagcaacagtcatgcttctgctatgaataccactgacagatcaactgtcatttctaagaaatctacctcaatcagtcatagttctgctatggatgctactcacagaccaaccatcatttctaagaaatctacttcaaacagtaatggttctactattgatgctactgacagatcaacctccacttctgaaaaatctactccaagtaacagtcatggttctgctatgaatactactgacagaccaaccaccatttctaaaaaatctacctcaatcagtcatggttctgctatagatgccactgacagatcagctactactgcaacaacatctaccccaagcaacagtaatggttctgttattggtgccagtagtaagacacatgctgctggtgaagctgcatctgctaaaacaaatgttgctcactccgtcacaaccgctattgttgagagcacacgcatggtagatgtcactgaatgtccaatttgctcactatccaccgctacctcttcgttttcttcccaaaacggtcaaactgccctacatggcgaaccagtattgagagttagcacagtttatactacagacggtgttgttatcactacatacactccttcatgtccagaaagtgctaagacaggttttgttacagcttctgctgctactgctactgcaccttcagacgtaagcatggaatctgcccattccaatgttgttccatctgtaggtgttgctacttcttcttctaattctgcggaaagtgttacagttgcaaaatatgaaggtttggcagctagtttgacctcagatgttctattcagcgctattttaatggctcttattcatttgatctaattatgatactgttttagagaggcatttgaacctgtactaataattgacagacgctgtaatatatcatttattgtgattgtctgatgttagtataaaaaaattacagcacctgttgattattagtacaagtacaaatgcctcttttttttatactaacctcggttttatttatttactttttgtataaaatattttttttaaatataatttatttacagaacacttttagttggtctaatttatttttacctaaaaatattgaatcttgtcctactactacgagcatgaccttagtagtctacttcattctcatcaccatgacgctttcctttctttacctaaaaagcatgactacaggggttgtataagttattgaccttcttaaatacaactttatgcgtctcaaggacgatatttttttcatttcagttgtgaagaatacgtcactatctatatggaatccttcaatgctatcgtagagaccaaatatctgaagatcctactgaaatatatcaatgatcatatttgatactctaaagagacaatataaaacaatcaaactactccaatagatgtgaaaatgaaaagatctgtatctttgaatcaaatactgaatgggaaccctatatctaagagaactaagctgaatgggagtaaagtaaaaggaatatcgaaagacccagagactgtcgatcttgtgaaactacctgagcaggtagacctcaataacgttcaaacaaataaaccaaaaattattccacttggtgataatctatccagcgtcttggtgaagacatttctaatgaggaaaccaccaaagttactaaatattataggaatgtacttcctgggagtataattaattattaatctaatggtagtgtatattttaagtaagattgccaatatagcaagtaacaaatacacaccactgattattaacagcttattgtaaatctaattacgtattataagaatccaacttttagttatgatgtattgtgtgaaataaataatatcaaactgtcattatatatacttgaaatgtttacatctaattatatcctaagacttaataaaatatacaaaataatagaaatataatatacacccattagtttttaatatttcactttgtattatcttttccaataactatgtcattaaatattattcatttgtaagtattaatagtattatgtgaaaaattttggatgttgtaatatataaattatttaaacgcattaataaaggttggatttcatatttatttaatggtgaactaataaattttagaattctatttattatgatatagcaataaagattctagatatatataatattataaccataggtaagaaaagtctctctgttattttatttgtaaaataatatccactagcttttgccttattttctttttatttaattattagtatacttatcaaaactgttgaataataggcagataatcactacttttttatttaaaagtgatttttgtagatcattaaaacaactttttgaagaaaatatttcaagaaaaagaaatagtgaaggatcaatgtgtgtttgtttataaacaccatatatattttctgcatagtttttaataaaatggagatccaatttgtctaaggctcaagtaatagaaatgttagatataaaattcattattgtctaagataaaccaactatcttcaatactactgtgctaatcatcaattctatcatatgtgttaaaatataactccacataagttattgtctctatggaacctgatttaagtttaacttgctaaagttagcatcaatacaacactgccaatctttatcatttatcaaaatatttcagttgcaatagatgctaaagcctagaaattatttgcattcgcttatttggcatttttaactataataacgtagtcgaatttaagattgcataatttcattgtaaataatagttttgttttcaaatcttgcaatttcctttttgacatttatgcaactggcacaaatatgttgttttacactacttttgtgcatgacattttgcctgttgttgtttggaacaaacattgagaaattttcctttaaatgatcacataatagtaaaatagaaatatctcactcacatgaaattttctacttgttttcatcgtaaaatgggctaatagatgtttccaaataagcagaggtaattataatactataaacgttttaattatgaattttaattgtgatttgacatcaagggggaatatgctataattattgtttcaataattcatcgtatttattgtttttgtttcaaatggattggaaaattctagtggataccaagtttgtaatttctttgaaaactaatatggtgttgttgagaagaatagccagtcaatacgtaagctaaagttttttaagacaatccatagtagataaagttgtttatgttaaatgttttattttcacttcgaaagaaatgcattttttcattacttcagcgcaagaaaaacagtttttttttctgttgtttttgatcagaaaaatttggacattcatttttttaatcgtattagatgttgatgttattgcgtcaatgtttttatgtagtattaggaagtgaatcatttcttctagtttggaatgtatgcaatccgcaacctataagaagtagttgattcattattgtataaatatttattatagttaacagaaataatgtccaaaacatactcattatgatatatacaaaatcttttgacccataggaatttagtataacaagagattgtcgtatcctgtattatataaaaaaaatgaagttcatagaaatgaaattgtaagttcaaattgatttatcccaagcatatttctaattagtattcaattaatagggaaaattgatacagtcatttatgagattcttttatattattacagttgaatatcagatatctagagatctttaaaaaaacaaaaaacacttctaacagatataagtaaacatcttttatattatgttataaagcatactgtcctaagaacatattttaattcattgaagagcaaaagctctaattctaatgataataagaaaatgtttacataactacgaaaccatcaaaattttcatgctttataaatttgaggaggtgttagaagtattgttttagaaacatagtgaaaagcaaaaattaattacggtacagtatcttggagagacatagtaacgacgttaatatcggtgagtatatttattcttttagaggcaaaaagaaaattaaaacaattcaagtgtatattgctattattattttaggaatactaaaaagatttaatagatttataacaaatcacaaaactgaataatactcagataaatgtaagttagctatatcttgaattgaatttggtgcttttacgtataatagagatgttttaataattactagcgactaaggatatttatttattagagtccttttcaagttttaattgccaagtatactaaggttaatttacacttaacagagatataggacatcaatattccttaaatttggtaattttcaaaattcaaactaaaaatgttgttcctttcgtttaattgcttatttttaataacaaattttcatattgtagtatccaaattaccataaaatatttgtagttttatgttacaattgtaaaatttagtaagctatcatcttcaatatatggctcaaaagagattttatctttcaaatttattgttaaaaccactcttttgtccaagtgttaatttagcagtgaagactactcgctgtaacttgtgtttattctgtatttgaatgattattcatgtgtaatattagaaatctctgctactttattgataatatcgccccattagtataaaatttatcttgaaaaaagttttgttgtgttttttattgcatataatgcctaagtgtatcactgactatttgaagacaatatcatattaatataattaatgataatatttgaaaatctaaaaaaaataaaatcgtctatatttacacagatgtattcttcagaaatattattgttatgataaattgttttgttatttcataattagcattgctataaaaaaggtatatttgacatatttgttgtatgtttgattgagtttctttatattatttataatgattgtgttttctaaggattttgacaaatccagaagattttagaatgatttattgaaaagtagaagcatgactactattattacaacagtcccacataacctgttttgatctatatgaaagaaaatcgaagacaggtatcctcggaaaacaaagtgttttgtagtaattgttggatgtctgtttcaaaaatataataatagaaaacactctatcattaaaacagatttggctagcaggggtcttaacaaaagtaattaattaggaagttttctgagatatttatttatgtttatttggtgttttattatctaacccatgtgaaattcaagattgaaaggactaatctctgtctcttcaaaagaaaaatggctacctacaacaggattccagtagttgtgtaatttaaggattttacatgtcccattaaagattttgctttcttttacaagtcgaaaaattttttttctctgactgcagatatttttcgtgagatttagctcgaaagccgttgacaatagagtaaaaattattatgacaaaaacactacggctttatcccaaaaagggaaatgtccattaaaaaaagcttagattttgttttgtttttccgaattcagtggatagaatttcctcgagatcgcattgttattcaaagttgcaaatatttgaaaaaagaagaactgttaaaaggagtcctaatggaggaagatagactaggtacgtaagtcttcctccttgttgtagcgtgtaacaatcctgtttaaggctagatggtagagttaacattacagaaaaaactcatccagtctttcgatacttcagtgtgtaggatagacacttttatagagggtttccagtacattttatggaaagtataaaatagaaatgagaagtattatgattaaaaaataatatgtgttaaaatataagaatttgtaggtagtagatgtttatagtatactatgtgaagtattcttttgagtgtatctttaaaatgattttaaaagagaagtactctgaactatatattggttaaaactaatataaacaagtggattttgttttatttttattggacagttgtatagaaaaacaaaagaaaatataatatttttgttagactgtagtatttttaccctttagatggttgtaagcagtagtgtataaggtggatgaagatggggtgacaatatcaacaacttctgaagacgaagaactgtcaccgttaacaagggtgatggtgtaggtagtgtcatattttaatcgatcttgtgacatagaagcaaatctggtctgacattactaaaattataagcaccagtctaaattaaagatttaaatagtgtattgtgaaaagttgtcttaatcttaagtctaactattgaagaaaaataaaataaatgatatttatagaatactgtattttttttaagaaacgtatcaactgtttcgtgcattctattcttattatcgtttttttgagtttttttaccaattttaacctggtgagcgtatgatggtcgttatactctttaatttttagggtagaaaaattattgagtaaatcttaactagtattttagaagatgattcaagataatgtgataggtattactaaaaatcaaactgttggtattgttataatataggctagtaaatatatatatatatagatgagaaagattgtttgtctcgaagatggaattttatattaggatcaagataagaaaacaaagtaataatttcacaaattccttttatagattgtaaatagttatttcttataaatattgttcatgatactctcagtttttttctattatataagaaggtaaaaaaatatacttgcaatttatgtatgaagggttatactaattaatcatgattatgatttttagtagcatcttaagtgcagatgctaatgctagaatttttcactgtcttaatttttgatttcttaatttgagttcttcacaatggttagttgtattaaatttcgtaagaagctctatttggaatactgaaatacgcagtccacaggtaacaccctatattaaggggaaagacttggagtagccaaaactttgaagccaagtcgtaagtgtattcgaacaaatgattgtcaaattaacgttggcggcagattactgaaaatttcatttaagaaatctctgattgttgagagaatgtgccagaggtaattattagttttaaggttggtattctatcttctaaggtttgcccagaaaataaaataacttaagatcagttcaggtattcaagatcagccaaaaataatgagtttattagtttagaattgaccattatgtgatttgtaaacgtttatagatataattaatatctatatttttgtatattatttataagaatccttacaaatttttgtctggacttttttaatgattttcaaaaaatttgtataagaatgaaattaataactatacttaaatattatatatgcaaaaaacaaacaaaaaaaggaaggaaaagaaaaaatcaaatatagaacgacacataaatattaagagatgatagattcttataaaaattgtacaaagcagccgccaactatatattaatattgcttcatagatgttgacgcaaggcttcggaatcaaaaattctagtagagttcattttagactaatataataaaaaaatataacttacaataggatattggtggtattataagttttattgatatttatagttgaaagctagcaatactataaattgttattgtattgcttggtcttttctttctacataacaaatatacaagatacaatattatacagtatactccttttatcttcgaatcttctttaatataaatttttataacttacatggatgtattaatttttattgtagcaatgttaatggacattatttactctactcatatcccaatcatctgataattttgttactctttgttagacatagcaacataaatctcgaaatcaattacaaccttaaacattttgtataataaataatataaataaactctgaatatgtataataactcattaattattatgctgaggctaatttgctatttactctaaactgtgtgctattttggatcttaactgtaatattaccaatatgaatataagtattagaacaagaacacaactaacatgtttcaaactatctaatctgttataaatgatctaacaactcttccaataatgtatctataattatattctacattataaacatcacactagtagattattaattgtattaatttaacagaattatttgtgatactacaattcattatattaaaatgatctctttgattatcccaatactaatacaacactatgacaattagatagacaaagatgataatctatatgagcaataaataaacctgctactattacttactgaagatatttttgatgttatcaatattattaattattcatatctcaaccaagaaagctatcattatttagaatgcttttatactcttaatagaaatttatatattaatatgtttgtttgatcatcaggtaacatatccaaaattattattacaactatattaaacaacatcttactatctgacaagttaaacatttctggcttatgtaatacaccaactcaaacaagtctctatatactatacccctaactctttctcattctttatctttttcaatctcaataaattttaattgatcaaagaacatttcaccttttaatcatttcaatacatgcagatgtacaaataaaataacttgattattcataaatcatgtggtaacagttgtttaatttccaacaggaatgatatctactggtattattataaaccttaataaaaatttagtatgtctccaaatttatttttctttatttaataacatcatcattgtaaattgcaatattctaacagcagatgtttttgtattatcactagttaactaggtagcaactgcaactaaaaacatttgaattgggaaagtattgatgttgtacaattcattagagaactaaaccaaaaatgactggaggataattcacgtaactgtactggatatcattcagtatatgttcaaaagttagaaggcagcaccataatgttgtgcattattatacataaaaactatagtaaaatattttatacataacatacatgtaagttatagaaaaaaaagacataacaacaaaactactcaaagtttgtttaaagttgctgtttcataaaaaataaattcttgcctaattatattaaatatctaatagcgtcctgaaaattgttaattcatagtaaactaaagttcttagcttgagtatattagataatactatataaaataaaaaggctcaaattataatgttgataatattacttaacgtaaatgctattccacttgtctcgtttatacacaaatacaactacttaagaaaaaaaaatacacagatccaatgcaaatcaataagaaactaacattttgttgtacatactatatacttgaagcatttttacttttcattgcaatctttttatcttaatagacaaaaataaaaaaccaattggtagttacacaaaacaagtacctttattctaaggagtaaacaaggattgcaccgaaatagataaagttatattatgcctcatcagccatattggacatatttcccattagattttgtaattgacagttattaaccttgatccatgaaaactgctaacattagctaaaccagcaatttcttatacaacaagataaagctatcagcgacttatatcgttaataatcaactttcatcttatatgtacgtacaaaataaatatatcgatatttaatagttaaatgacgatccattatgaacatcgttacccatattaaaatttgttaatggtaagtgcctcgagtgtaaatttgagatatcgatgtaatctggatttaaatcggaaagtttagtaacacctaataatttcattgaaagtattaattcattgaccaatagttcaatagctttcttaacacctttagcaccgtaaagagaattggcatatagaaaaggagatgcaataccacaacctttagcaccaagacataatgcttttattatgtctgttccacgacgaataccaccatcgattaagatatcaaaatttttatctagtccacgttctcttaaaattggcatggcttcaactaaagtttcaatcggtggtcttgagaaatccaattgtctaccaccatgatttgataatacgacacctctacaacctagttcagctgctttgataatatcatctactctttggacaccttttaaaacaattggcatattagttagtgatttgaagactttaatatcttcccaagtcaaatcagtggcaattaattttgataaactttttgatgcaccgtttgtttcctttatgtttcgtttcttcttttgtgcaacatctggaccattattatttgtgacagaaaatttaaatctgaagtctctttctctattaccggcttgtggtgcatctactgtaacaaataaggctttcattcctaaattctcagccttggtaattaattcatgtgacagttttctgtctgaattaacgtataattgaaaccattgaacttgttcttctgagttacgagcggcagcaatatcttcaagtgggaaagaagaaaaagtggaaatcatttgtggtacatttaattcactacacccttcagtaatggatagttcaccactcattgggttgccaagaccacatagtgcagttgcactaacgtagaatggtgcatttaattgagtgtttaagatttttgtcttaatgtcaatattagtgacatcgactagaatttttggcttgaaaaagattctactaaaagaataatgattttctctgtatgaaacctcatcatctgcagaagaagaatagtaggcataaacttgatttggtagaaccttagaagcaatggattcaaaatcgtaaagattgaatatagaatctaatggaggcaaagaattttggtcttgtgtcataacagtgtagggtgtgtcgggttattattatctgtgtgctgacattatgatggaatcctcttattggaaagttttttcagaagcacaacccacactttatatatgtataccacagtaaaaccaacaaagatagtaattgcagtcaaatcatgctaaataattactcatatcatcctgtagcgtagttctatattcgctgcatcttgtcttgaccattgaacattgcccctcttacttttttaattgtttttttattatgttcttttttttttttgagtaaacttgactcatgcaagaaatatccagtggaaaatatctttttttgacacagccatccacagttttccacagtcatcgaggaaaaaaaaataaatgaaaaactgtgtgagaagtgaaaaatttcacggttgggaataaaaagcgtttaaagggagaaaccttgcattcatgagtcaagtctttgtcttttaagtccgattattagttacatgggatgattgagaagcaactgtgtgtgagaaatcgggaacgcaatgcttgatttaactaaaaactgtgtttatgtggctgtctttgcatgtaattgtggggattgaaaaaaataaaagatactacaacagtacacaataatcacattgattcttcataagcacaatactgtggctttatagtgaagagctgtaagaagggttaaacttttattaactttaagtacctattgaaaagtatttaaacctttttaatttcatcttcctactatatttgtagcaacgttatttcatttttattttagtattttcaactatgagaagaaaagctatcactaatgaacacgcacataaaccaaacataattgttagtaatgtccttggttaaagaaattatcgtcgatccctatagaagattgaaatggggttttattccagttaaaagaaatgtggaagatatcattgaattcagttcggattcctttaaggatgatagtacatccactacatcattaccttcagaaaagactaaagaccaaaaatttattgatgttaaagtcgtggaagacgttgaatatgaatatagagatgaagccaataggaaatggtggagttttttcaatgaacaggaatatagaatcaaccaaaagcaaaatgctacaaacaaatggtatcactggtttgctgaggatacatcatatgccgaaaagaaactattaattaagttagatattcttcttgccttctattcatgtattgcctattggatcaaatatttagatacagttaatttgaataatgcatacgtctctggtatgaaagaagaattaggttttaaaggtaacgatttagttaatacccaagtcatgtataccgttgggaacattgtgtttcaaataccgtaccttttttgtttacatagcatcccattaaactatgttttgccctttttagacatatgttggtctctgttaaccattggtgctgcttatgttaattctgtatcccatttgaaagcaataagattttttatcggtgcctttgaagcaccaagttatttagcttaccaatatttgtttggatcattttacaaacacgatgaaatggttcgtcgttccgcattttattatcttggccaatatatcggtgttctttctgcaggtggcattcaatctgcagtctatgaaagtcttgatggtcgtaatggattatctggttggagatggaattttattattgatgctattgtatccattgttgtcggtattattggattttattctttaccaggtgatccacataactgttattccatttttttaactgatgatgaaattagattggccagaaaaagagttaaagagaatcaaacagcaaataccaatctatctgataaattatttgatctcaagatttggaaaagaataatatttgattggaaaatttatatcctaacattgtggaatgtcttttgttggaataataataatggttcttcaggtgcctatctgttatggttgaagtcattgaaaaggtactctattcctaaattgaataaactttccatgattactcctggtcttggtatgatctatttgattggtacaagttttgtagcagataaatttcattcacgttggttagcaattattattattcagatattcaattttactggtaatgttattcttgctgtttgggatgttgaagaaggtgccaaatggtttgcatttatgttacaatactttggttgggccatggctcctgtattatattcgtggcaaaatgatatttgtcgtagagatgtccattcaagagcagttattttagtggtaatgaatatgttagcacagacatcaacagcatggattaatgttttagtatggaaaacttcagaagcaccaaggtttcctaaaggttttatttgggttgctgtagcatctttttgtttgtctatttggacttttgtagtattatatttttataagcgtgatgagaaaagaaatgcgaaggacaatggtattattatttataattcagctaaaggtgaaactccagaacaatttgaaacccaggaatcataatgtagtttattctgttgagataggatccctttgataaaggtaaattaaactatcttataatgctattaatcatttctttctttttacattttttattcagcatatatatagatattcttttcaaacttaataaaacaatatattaaaatattaaatgcttctaataaaaaagggagatttatcgaaacatcgaaatagcctataacatagtgtacattatataatctttggccgtatttgttaggaaattttatgcaaaaaccctagaaaagtataattagcaaggctatgataactcacatacctttgagagataagcacataaatcaggatcaatgtttgatattgtcgatgactgtataaaatcattataacacaagatctcatttatgaaaaagttattcttttcttgttgctttttaggttttaccataccttcatcatacgttcttttatatagctcatatataaagaaattaaactaatcatgggtttccaaggtgtgtagcctgctaatccacacttcgaatacttcctaagagtaatatgccttacacacaccaagaagtggaaaaataggaattttctgagtctggacatttttcaaacatagaaaataatggaaagtaaaaaaaagttcaaaagaaatatgaaaggatcacagacacaattaaatgaatgtagatattttttaaaaatataggaaataagtaatgactatgttcaataatttttagatagatgttgtatatatatttttttgctctccgtgtattagcaccaggagtaaatagacatatccgtaattctgtatatcagtaagtaaattatgtttatcttgaaatttttatgttgcttcctccacctcttctaaatataagaaaaaaattatttcacctaatgaaccatgtatattttttcacaaaacacaaaataagtataacaaataacagtagaaaataagctgttccagcatataacccagcttcaggggaagtgattttattcatatacttcatagtagcaacaccatgagccaccatgtatggtgctaaagttgctaccaattcttatcaattacctctctcaactgcatccttaaaatactaaaaataattatttgaatcaaggccccttttaataattttaaagtatctatcaactttaatattgaattcttctcataatttttttaatgctaactcatctcttccctaattctatttacaatctataattctttctccacatcttctaattctggaaatcttgaatcagtaatataatgcactctatcataaccagctaaataagaataatctggtgcaatgaaaaattgacatttttccaacagtaaagtactatcagctatttgttttatacaatcatagttaacatgaacatctcaatatagtttaacaagtggaaattaaataaaatcttcaaagaagtttaaataattaaccctgaatttaatggtttagtaactagtacaagtgcatgagcagtaaaacattcatatcgaaccattattttcaacagtatttcaatttggtatgcatagttcagtaattcattgtcatcaattttaatagagtgtgtgttttgagcatatttcaatgcagtataaattgcctctcttaaattgaatccatgagctatattgaagctggttgcagtagaaataatgccattttaatacttcaacatgagctttaaagatggtagaatctcgagaaccattagtaaacaatatattaatgccactttcactaccaactctacaatttttctatgaataaactaaatatgacctttctaaataatataattcaaacgttataaatgcatttgatttatgccccaataaaatttgtcgatttttcatatgcagtttaatgaagaaaaataaaaaatgtaactattgtcctttcaaaacatctcaagtagtaaacacattactgtagagctggaagttctcccatgctatcattgatcatatttgtaaacaattcaaagttggcttctaaaagcgaatttaaaatatctggagtatctgtatcagggtattctatcaactttgaaacttggtcatctgatgtagatactggaaaagtaggaaatgtaaaagctgaatcatcaatgagttggtttaatttttctaataaattgggaataatatttcccaaaacttcttcattagccaaatattctttaactaagtccgtattctttggtccaacaccccatttaatgttgattatttcaacaattcgttccggaatgctactggtattccagattttattccagaaattattaatcatttcggttacatcttcttggataatataatatatatatctaatcatctgtaaagcttgatctgcaccaatgtagtcatcctcaagttcaacggatgtaaaatctacggttttcgctaaaatatcaaccaacctatgcaaacatctattgactaattctaattcatgattaatcacatcatattttgatcttttcagcatctctcttttgtaacttaaccttaaagcaaaacttaataacgttctccatatcttaattaatgtgaaaattattattttatttaggcaaaattgatgagagctcaaaatgaattctgaatatgagccatttaaataattgattgtcaacgaagtcaaatccaagaacagttcaaaacttttaatcatatataattcatacaattctatccatttaggatcttctttctcagatatacatttttgttcaaaatagaaaaacaataaagaataaatacttaccacacttgattttccaataatgttcatttgcacaatgtataaatttttcacagcatctaaattcataacagcttgtctccaggattcttcttgtatagtaaaactattagtttttatactagttagagcgtctaaagaaaatttattgtccataaatgataataatctttctatatgttctgtaatgttatcaagatactgaatctggcttgttgttgaaattgacgacattactttaccaagtagtatatgaaactcataaatatcttcttgtatagtgaacaatttgaaatcaaccaaagtagattctttaaatctgccatttaagtgtgctgatattccatcactagggagtttaaaccattctaaatgtttcaaatcaacttcattaaagctgccatccagggtacatgtttgtaatttaatagattgaagtaatatccacaattttctcttgaataaaatagtaagaggctcaaaattaacgctgtttttaaatctctcaaattgacctggatcattatacagtcctaatgtatttgcaagatttgaaatacaatttaaagttaaaacttcatcatgtgtgacatgaatcgctctatttcctgcatgcaaatgttctgcaatgaatagatagattgtacaacataatatattctcattagtgaatttgaaaccattcaacaaagataacaatttttgtgcaaacactattaattgtgtggcaatatcactagcattctttttatctaacatctgtatcataccagaattagataaggacctagttgatttgattaaagtagatctaagagaaatagataaaattagtaagaacataactaatgtctcgagtttaattctaatattttggtgaaatacgttaaattcataatggttactatgattctcaactaaaatgtccttcaactttttttcaaataatggaatctctattaaagggtaatatggatatatattttcataaaacaaccttaaataataattaatatgctctttgtctatcatgataatttcgatctctctaataatcatttgaattgatgaaagtagattaggatgcatagtatcctcaattgtataagttgtgttgaaataatctagtggcaactgattttttacatattcattagtcatcttaacccatttaataatagcttgttccaaaaaatttaaggggcccaattttttctttttattttcgctacttgaagtttctgtagaatcattagatatacacgtcagttttgactgcagttcagtcacagtatttccatgtaaagctccacatagtagccttgtgtaaggatcatattgtattaaaccgtgagagccaagcgcaaagtcgtaatatgttgttgagccataggagactattaatttgtttgggttccataattccaatgatattgtattgccatttttctgttcattttcttttttatataacatatcagccattgtacgtttacttaaagcacgatgtttccaataactatcccttgatgacacataattacttgtttcactagaacttggcgaccttatagccccacttctttcctcaataaaccctacaggcgatatctgttcttcaaatagtcccgtttggagcgacaatgaaaccttatcagtctgactagaagtactagatctagatatttcttcaggtggagttattattgtagtgttgtacatggtaaagggatatacacatgtttttttagatttaagacatcttgaacaactaggtcttgctttatcacattttaattttttttctttacatgaattgcaaacagagactacccttttattcttgtgtattttgacaacttttgttgacatattgtggatatactcattaaataatttggtagagataataaaaggaaaagaatattaagacaatatgttgatgttagttgagctctttttaccttgatcaaaggacattagtagaaagaacaactacatggttttatgagaagaccctacttcatctaatctgactttaacagaatcctgttccattaaataattaatctttccttatacaaacgaaagtagaaaaattgaagcaccggaattttacggaacttagaaaaaatttacgttttctgacgaaattttcaattccttacctttctgaagaaacaaacattcagaaaatgctttgcgttgagctatttaagaatcaaatcggtattaactagtataggatctactgatagatatgcttttccaagaggctacatttgtacgtatatgaatatcttctattgtttcaactaaaaactttcaaacagtgacgggaaaaaataatcaagacagagctgcatagttttatttttagaaataaatagttattgcgaactaatacatagttctctcagattataatgatctatgccatttaagataacttatatatgtgtttttcctcttttctttttggtatagtgtcctaaaaattgttaagactaatgaatatgtatcaaagttcttcaaatatgtacgtatatccaaagatattaaattgcaaaagtaacatctaattgttcttcttctaaatattcccaccaatttttatgcaacttccaacactgttgcatgataatatttgccatatatgcactttttacaccagcatttgctaaggtaataaccctttccatataaacacctcttaaagataagcatgagttatcaaaaagatcgcacccacaacagaataaacaaaaaataatacatgcagcagtggaggattttggtggaatatatctgattaatagatttgttatttcttggataagtttttcgacttcataatgatttgaagaatatccaaatactcttcttttcaattgaagggatccagtaagtccatatattatgttggtagcacgtaatagttcatatgtttggtacttatctgcaatattatccttatggttaccactatcatttatttgataatattgcctacgaattttatctcttgcacattcagaaacgtaaagatactggattaactcttgatctagttttcgtgcttgtattacaacctcttcattaatatagttttgattaactaaagatgaagtttggcctagatataataatactttggggtccaatcctgtgcaatattcgatatcatctagatgatatcttttactataaagaaaatctttgtctgtttcatatttttgaacttcgtagaatagatgtttaaatatattgaattgaaaatccattgaattttgatttatggaagataatgaactgataatattgacataggtaaaccatctatttaaaaaaaatgttggatccatttcatcataaaatagttctactctaaatgaatcaacatctaatgtattaattttttcattaatcaaagttcgtgcaccaagtaaatgtttcctccatactcttctgttatcactgaaaaatatatcaaacatagacaacattaaaatagtggctaaagtttcatctcttgttctttggacaatattatttaacgagaccgataaattttttaatacagtaaataaaagatagtctgcaatagcaggaggtctctttaaaaaccaaatatcgtctaaatagtaagatgatttttctaaagattgattatacatttctattgaatttattgtcgccaaacttgcagatgaatcagttatatgatttttggatgatgaggataacaaaaatgtggatggttcattcagaaaatttcctttatgtgtatcaccaaatgctaataacagatataataaagtttcattttgcatagccatttgtggtaacaacaatttaaatggattcttcaagtattttttaggaccagttggaattaacatatgagacgttttttgcaaataaaattcaaaaacattcatattataacgtgaagacgttaatattggtggtaaaaagcttggtgatctgatcacaaaattttcaagtggttcaattatatatgaaataagttttgtattattaaccaacttggaaatatcccctgaagtcttcttttgtgtctttgaatgattcttgtttaaaatgagaactccatttttcaattttaattgtggtattcttgagtgtcctgacattctgcgtaaattcttataaggcctcccaccccatttcaaaattatactataatcacagtctttaacatctcttctgtaacagttattacatctaggtttattttcatcacacttaatcttccattttttgcattgtctacaacctttcctagacctaatggagctcatttctcatatttatagaaaatattaatacgtatgtgtacaacaaccctgtcaaagtaatagtaataataaaaagaaaggcagggagatttttcttttttctaaacaattaattagtatagatcttaattatacttgattgatctcaatttcaataaagcttttataaatattcatttgtagtccaatcggagatctcatcaaaaacgtatgtacagaaatgcacatgcatacacccacatacatccttctatataactaaaaaagagaaattaaaagaggaaaaagagtgctgacaaagaagaaagaattttacatgtaataagtcaattagtcatgcatttgtagttacgtatatgacttctatctgagtttttctcagtcctgcttactttcttcctttgaaaacaacccttatcataacaattccaggttatgtttttttttttttctttccttctttttcctttgtttctggaatttgctgtgcatcaaatttgaacatttcaggaaacgaaagataagaagctatgattggatttctccaatgcttaaagaggacttgttatttctttttctctctatggttttaacgacggtttaatttttgtgattaatagaaggatacgctgagttatgtaatgattctatatcatcagtcaacatttcaaaagatacaattcacgtaaattatatcatatctctatccttacttgaattttatgttatctaagttagcttggctggttttgattacacgcatagcttaaaggaaataatatataagaattcttaaatacttaattaaatagcattaataaaagagaagataaaaaaaaaaaatacaaacaaaaagcctcatattttattttatattatagtttctaataaaactattacaatcatcttttcttacttttttttttatgttgatttaatctaatccgatctaatctaaatcagcaacaatttgggaccagttaccgtgttgggttctgccatactggatatcggcgatccaggaagcaatttgtttggtcaatggacctgtttgttcacctggtaataatggaactttgatatcagaaccgtgccagccgatttctttgattggagatacaacagcagcagtacctgcaccaaatgcttccaataattcgccctttttggctctttcttgtacttcagtgattgtatagtaacgttcattaatatcccattcctttggatctaagttttgtcttgttagagctagaatagaatctctagtgacaccttctaagatagtaccatccaatggagctgtaaccaattctttcttacccgtagcagtgttcttgaaggcaaagaaaacgttcatggtacctacttctgtgatattcttttcgggaccaaacaaccataagttttgttggtaaccacgttgagcagcttgtaactgtggtaagatgcatggagcgtagttggcacctaatttcttatcaccacaaccacctggccatgcccttgtggcatagtcagtagcctccaatctaactgctttgaaaccagtcttataatatggccccactggagaggcaatgacgtataacaaggctctatccggagtggaaacacccaaagctggcgtggtaccaataatggtaggtctcaagtataaggaatagccttggccttgaggcacaaaacgtttatcttgttcaatcaatttacccatcaacttaattaattctgccccgtcaaaagttggtaagcaaattcttgccgctgatttattcatacgtttcatgttcatgtctggtctaaacaaagtgattttattttctggtgttctataagcttttagaccttcgaatgcttcaaacccataatggaacactacagcagaaggatctagctttaatggaccataaggaacaatttcaggagaggcccaacctttttcttgggtccattcgatctgtaacatgtggtcagtgaaggtttggccaaagaccaatttatcatttggtagagggttggatggatttggattcttggtaattttaagtttggaggcatctagtggggcaccactgacagcagaggctaaagttctatagaaaggaatagctctacatagagtagaagatacagctctcttggagagggtagaatatgaagataacattatttaatgtctgtttgcctagtatgatagttgtttatactcaacaaaataaaacagttttattttgttgagtataagaaaaacaagtttaacagaaactattcaacaataaacaagattacagtaaccatgaggaagatgaaccaacaagcacacacacacatatatatatatatatgcttatatatataaacacgtatacacatatacatatatagatagatttgtttagtcacagtaccttgagtgaaaaacttcgagcagaatacaaaattgaaaaattgaaaaattgaaataaaaaaaagaaagaaagaaatagacggtagcacaaagaaacgaaacctaaaagaggaaacaagtaaagaggcaaataaaacaatacaaaaaaaaaggatataaagatgatctcaccatctgcagaagagcagttttgttataattaccttctcagttgcagagaagacacagtaaaagaaacacaaagtcgcagatgcactagtttagcaacacatatgccactggctttcttgtcccagaaccaacagcacaagagtaaataaagaaagagtattgcctgtcgatatctccctgtcgatatgactcacattgcacaaacaaacataacaaccataacaacatccacacgaaaataaaaataaaaaggaaaaacaagatctccggtttattccggcaaccagtcgagcccgaggaagccggaaccggttttgttctacacactatggtcttgctgcaggatcggaagatagattatatgagtgattcggtgctctttttaaagacatttcttgaattcccagtagagacttttttcaggtcatattatacttgtgtatatagtcttttatttttctttttgatttatattttttcttattaaaacatgaaagtaaaagaaaaaatcattaaaacctactaacttatcttaaataaggtgtcagtgaacacgaccatccaactttctctctctctttctctctctctctctctttttttttttttttcccactcaactacttattaaaatgtcgacaataatgttcaaaaagacattattacgttcacagttaagaaaagtgttaaaatcaatcccaaaacaagacatatcagaacaatcacagaagatatctaaacagttgcaatcgataatcaccaaatatcataaaacagcttctgactcttctttagtgaggaaaattggttgttttcttagcatggaccaaggtgaagtagataccaaatatatgctagaatggttgtttcacccagggactcagagtaatctgactaacattgaagtctatcttcctagatgtacatctacaacagagacaggtcaagtgaaattgagaaaacattcagaatctaatacaccaatagaccaccctcatttaacattccataaagtggactccctcgatacaatcaacaaatggaaaccacagggtaaatatcaattaagggaacctccaagagaaattccggatcctctaccaccacagatggacataatgatagttccaggtgtggcctttaatattcgaaacggggccaggatggggtggggagccggttattatgatgacttcatcaaaagatatattttaagatataagactagaccattacttattggtgtatgtttaaaacaacagattgttcctgaagttgaattagagcctcatgatcaattcatggattgtatagtagcaggtgacggtagtgtgaattggattaataaagattttacgtagtaagatattttaagacttctctttttattttaaaagtaaaaccggaataagaattgactgaaatgcattatattatgttacgttttgtcatattaaatcaaactaaaaaactgatattatatcataaataagactaattacaagtaaataaggaatagaatggaacattatccttatattctatcataatgatagaaataatgcattcaaaatataataatgtgcataagattgaaaaaataacaaaaataaaaaaagagagagagattactatcttttgttgtatttcttgtttttatctatcctcctctttttgcttttatttctctttttttaaattttaaaagaaccagaaccttgaactaatactctttgcccagattgattcattacatctgctttcaatttgacagttttaccattttgttcgatagatgtagtacgaacaatgacaaactggttagctaaagtgggcatacgataagatactttcaaatccttgattttttcccccttcttatctagaacaaatttgacactttctctcattaaatcttctaatatagtggctaagataccaccatgaacaataaatggatacccagtcaacttcatacccaaatggtaaattcccacagtatccttagtagttggattgtaataaaatcttggtggaattgcgatggcgccagggctgagaaggctttgtaagaccaatctgtttttcctaccatcgacttgaccagtcatgtctggcttatgtatctccacataaccattcgcatttaactgtttgacaatagatagattctccaacctagcaagcacttcacccttatacttctccacttccagggcatcttgtggtaaactatcatatcgcaagtatgccattagatcagtgaaagtcatatgcttagtcaaataccaaccaaacaaaaaactgccaccaaaaatggatatagggatccattgtttcatcgaagatgatgtcttacctctggaacccaacttgaaatcttttgttgcattctctgcatatttgacccctgtagatgaaaatcttttgatattgtttctaaaaatactcttaaacatactggaataaccctatcctcttactttattctaattatatactcatttactatgtgaatacttgtaaacttactgacccagaatacaaactgcaatgctaatagtaatgtctactcctctcgtgtattctctgcaaagttccttttgactttcttttctctttaaagaaaaaaatttctaatggcactgctgaaagagcaaaaaaataaaaaataaaaaaaagaagtagaaattggtgtataagggagggaaggaaaaaaacaacttaaatcaacgtagaagtatagtagaataacatcttaaaagagaggaagggtgaagaaaatattaagagtttacatgtggatgacccatccaaaacaaaataagccaattgtcaacaaaattaaaccatagattgtgctatttggttgtacccttatcttctaattattcgtttttattttgtttttatctttttttttttatcattcttgtttaaacatctttgctcatatacagacccaaacttgatagacacatattttttattcccaatgcacttgaagattaaaatgctttcattgaatgatataccgtcagatgactcaagaaaagacaaggtaccgacatctgaagaactgtgtgacgcaaccatatctctgtggaaagaagatcccgacacggaggtgttaccgtcatcccaattatttgctagggttgttcaaaggtgttcgggatggagtttcgatcaggagacgtttgaaactatgttagtagaaaagaatctttattccttagatgagacaaaattaccagtctattcccatctgattcaagtcccagaaatgtgtcctgacttaactctcaatcatgttaaaacttcaaaccagtcatctaaatatctaggaaatattaagattttgagcacatcaaataatcacatggggagagggctgtttgctgagaaagactttaaaccaggtcaattgatttatgttgaggaggatccaatctgtattattccagcgatcgaaaagctggcattaatatctcgtggtaaaatttgtgcgttgtgtaatctgtcattgggctccatcagttcacatttcattatgaaaaatggattagattgtaatacatgtgcatcagtttggtgcagtaaaaaatgcaagagtaaagatattattcacggagcgttaaaacataataagggcaacaaaaacaaggtggtaaattgtgccaattggaacaaatttgaggcacattgtcaaaagacttctaatgattcagcatattctctgggtgtcatttttgctcaattattattgaataaagattcgtcaaagagaaacaaacagtatttaaaagctttatgtggtgtatcacaaagagttagagttagggggcagtattcaatacaagaatctgaaaccagtgtagataaatttgaaaacaaatggagagaagtttatgcattgtttatagagagttttccaacactggcagatgatatcgattttgagactttccttttttgcatagggaaattcaatattaacaaattgtctaataaccaaatatattttatttcctcatttatcaatcatcattgtgaacctaatgttagatatgaattcgattcgaagttgaaattgagtttatatgctaggaaggaaatcaagaaaggtgaacaattatatatcacctatgtcaacccgttacatggggttattttgagaagaagagaattaagggttcaatatggatttatctgtaaatgttgtcgttgcaaaaaggaattggaacatttggacattcataaaaacgataaggaatatgatagagatgaaataacaaaaaataataaactgaataagaatagtatggacgaacttaaccgtggtaatattgataaaaatcagggaaatcgtaataatgaaatggcaaggagaaaatcttctatgagaaatcagagacctgatttacaagagttgttgaaaaatggacaagaatttgaattagaaatacctgatgttataaatataggaggaagaagaagaaggacgtcagtacggtttgatgagactgtttcaatggcgattgaagaataaagatattataaaaaaagaaataaagtgtaaatatccatttaaaatagatcggcatacacatatatataaaaggtgatgattacagtatacaacaggactgctttggtgaatatgtactgtaatttttgtcttaatgtattatgaaatcttcaatatgcaaattaggtacataactatatagatatataatggagaataaaagtatgtattaagaataattgataattttgttgatatgtcctgcatgcaataaatgtaaagatctattccataagttttttatattcttttttttttttttcagaatgattactcatacacgtggtttctttggtaatcgttcatcagtatcaaaagtagtaggacgtctgttaatattttttgaactatcattacttagaacatgagatgtgtttgaagactccatagatatatgaggctgtagtgattgtggaattggaaagctgtttaactgttgaggttgtgacatcatagaagtcgatagggtgggggtaatggaattattttgttgtaactgaggactattgtgtgtacgttgattttgccgtaacatatttgctgataattggttgttcactggtgaattcattttttgctcacatagtgggattctatcctttaaatatcgaataagcatcgaatgtagatcatttcttgtgaaaggttttgctagtatatcgttcataccatgttgtagataagttagcagatcttgatcttcaatattaccggtcattgcaatgattggagtttgattatcaaaacttctcactatagaagtagctgtggcaccatctaaattaggcatgacaatatccattaaaactagatcatacctaaatttctctaaagtggagattgctgagagcccatcagtgaccacttcaacggtacaaccgtactttcttaaaaatttggaacataactgtatagacactgcatcatcttctactaataaaacatgaaaaccctttctcagagtaacctcattagtgtttactggaatattattattattgttgttgttggtgttattagtgttgttatcattggtattaccaacatcatttgtggtatttaatttactaccattatgtggattaataatgctatgattattatttttattatttacattactgttcatatttaatgaatttattgattcattgctattggaatttattatttgagcattttcagaaatctgtaagttctgtttattgttgggagtcactgatatcaatatgttatttgtagagttattcattaactgtacttgattgtcaatattatttaagatagtttgttggtttctagcttgaactggtgatgtggaagatttcgttgaaccttggttttttaaagtctctttacttggttggctatatgttggtaatttttgattcattgtgatgttattatagagatgctgtggtacattgataccattattaactaagatagaacagacggtgttgaaattggaagttaaactttcatgaacagttttaaacgctatcaaactctctagaagtgttgtgtatcgtgttgtcattctatcgatttcatttttcaaattgtttgcctcatcattcgatctttttaattcattttctaatcgtgttactttatttctcaaagtctgaaatgtatctttactaactgtattttgtaataaactttctctttgtttttcagttaaaatgatgtgaccatttgaattattcatattatttatgttgttgtaatttgttgaattgccgtcataactattgttgttattactggagttgcctttacttgtattgctattagcatcctttttaggtacagttatttttctctttatattatcaagacctttctcataatgtattctaaataaggggtgtttaaattcccaactcaaatcaccgtatttagatttttcatcttgtttccttttaactttatggaaatcgtatttattcaattgtctgacaaagcttgcaaaatttgaatgtttaaaatggttgggcaagatctgtgatgtgaattttcctgtatctataaccacaaaactgtcgccatcatctgtccaacgtacgatttccgggtatgcattattctctaagataagaaagagtttcctaacaaattcattggatgatggtttatttgatgagaaagtagtgattgtatgacttgtggatccatcctttgtaggtatggatatatggtgagattttatttttttggaagcagttaaagaagtgttaggagtattagcattagtattagtagcagtattatttgtagttgatgctaatgttatactattagaagaatttatattcgaaggtggtggtatctgggttgtaggtaacgactgctgtgcaaaatttaaggcttctgcaacggatgtatccagatggtttggtgtatttaatactaaagagtttgtattttcgaccatattcggtataaagtttttagatgtattaatatcttcatgctttaaaggaaccacatttattgtttgtgtattggcattattcgtatttacattattactagtagtagtattcttagtatttgctctaatctcattattagggaaaggcggaggaggtatagttaaattgaaactagtgtcgatggattttgaatcagtggtagggttattagattggttgttatcactattgttagggtccattaataaacatatatatatctatatctatatatctatatatatgtatgtatatatatatgtgtgtgtgtgtttgtatgtgtgttttgtgaaagttgtgtataaaaaaaaaagtcaattcacaatgaaacttgacaaaaggaaataattgtactaaaaactagagatcgaatatagtattgggcacaggaaccaattgatagtaaatattaataataaagtttacacgtcaattatacttttagaagggaaagtttgcagtggtgtagtataatggtcagtgttctgtaactgtaatgataaaatcaaacataactcgactgaaggatcaagaatctaagatcacacaacaacctgtgacaggagaaagtagactgagccagaattctctctttgtagacagcgagtacacgatctctggtcctcatctgtaagtagcttcttgacacctttaatcctttcgctttctctctctttctcctttctgttctgtcaccgcaaaggatcaacagttcagagataaaagaaaaaaaaaaaagaaagaaaaagaaagagaaaaagaaaagaaaatccataatgatagcgacagcagaagtgacagtagaagtgataacaactagaaggaaaccaattaagatgttttaaaattatctttgattggttttcaacagatcattacaccttgtgatctgataaaagcatcacttttttttcttcctttctttgaaggattagatggtttgttagtcgtcaaactctccgccctatggtactattcaaaatcggaaaaatagcttctatgatttaattggtatgaaaggtaatttcagcatcaagacaccctttgtagattattgacttatggttaagcataattgagtgtatgggggagggagagggtggagggagacagagagaaagagtaatttttgcttttttttcatggacacaattctgtttagatacaatgaatatgtagtattcactcttgttagtaggttaatactctgcatctacaagacagaaatcatcatgatattgtggagtcttattcaaaattgcatgcttttgtagcgaatttctgttgcggctgggtgtattctccgttttattatcatttgcaacgaatagccggttttctgatgagtcatcataatgactaagcatctactttccaaaaaagaaatattttcgtattttttttttttattttttctttattttcctcaccgaaagtcgagaacacgtggaaaattacaaacgattgaacaaacaggaaagatgatcaaaatttacaacagaaccaaacaaaacgtttcgttaatgtaaaaaagagagttcataagaagattatctaggattttgttacttcgttctagataaaactacaccatattcaacaaacgagcactagtgctttagatataccaatttggaaaacaaaaatttacataataataataataataatatatattgaacaaataataatatgctttcctgggacgtttttggttggtgtatgtgttaaattactataaactttctttttttttttttgctatatgtttattaagtacctttgttggtaatagcattaacggtgataaaataattaactttgcataatactaacatataactattaaaacaaaacaaaaaaaaaattcaatctatatactgacgagtaagcagataaataagcaaatcaattgtatatgctttatgtccaaaactgaatctggaattttaataatttaatatgctattagatttttgtttatttattcgtcttagtttcaaaaaaaaaaaaataataaaaaattaaaggaattttttttttattttgttgttgttgtcacattcaatttctatattttaatttagttagagatattttggcctctttaggtttgtggaacaagcatggtaaattattgtttcttggtttagataatgcaggtaaaaccactcttttgcatatgttgaaaaatgatagattagccactttacaaccaacatggcatccaacttctgaagaattagctatcggtaatatcaaatttaccacttttgatttaggtggtcatattcaagcccgtcgtttatggaaggactattttcctgaagttaacggtatcgtatttttagtcgatgctgctgatccagaaagatttaatgaagctcgtgttgaattagatgcccttttcaacattgctgaattgaaagacgttcctttcgttatcttaggtaataagattgatgcaccaaacgccgtctctgaagctgaattacgttctgccttaggtttattaaacactactggtccaaatagagttgaaggtcaaagaccagtcgaattattcatgtgttctgtggtcatgagaaacggttacttggaagctttccaatggctatctcaatttatctgatcaagtttttataataataataataataataataataataacttcaatgacaaagaataaaacaagccattaagaaagcttttattttgtgatgtatatacctacatatatagatatatatatatgtaggatagtacttttgtttaataaaaatatttatagtatgtaaagtagtattaaattcagacttttaccaacagcttttcttgtagtactttctttttcacacaagtcaggtttatctaacagatacataaagtataacgtctcttgcttgttatttttccttttttttatttaattattcttataatgtttgtagttgtatatagttcatttcaatagatttactgtatattacttagaaaaagtgcgtgagatagtatatatataaaggatctatctcttcttacgagcaccaccatcatcatccccatatggtctcttcttaccgttcttagcaaagaactctttctttttttctttatccttctgtaatttttcttcctcagccttggctaatctcttcaatctttccttacgttgatctgccttcttagcttttttcttctcttctttcgccctagagacagttaaaaccttttgaatgaatgaacgtgctttcttctcttcaccacctaaaacaacagcccttttagccatatatgttttcttcttttgtggtttcatttgatgtatttgagatttaaatggaagttccttttgaatagattttggaaccttcaatccattgaagtgtctatctgatcgttcgatctttttataagcactatctggatttgacggtgttggtatgttcaaggcggctctaatttgacctgttagtctgacacccttccactctgttttctgcttcaataataatgaagtaactggattataaaatcttttaatgtgtactggataccatgatcttagaatgatgatatcactcatcaaaatcttatcttcaaaagttgctctgaaataaccttctggtttagataatgctctcttgatttcaccacgtataccagatacagttttaatttgggcgccttcaaatctagcaacttccatagcacttgaaaacatatctttaataaaagcagtgttcttgaaaatcttgtatggataaccaatcaatttcaattttttcacgatttctacgtcaacatcaatttcttccacaacaccagtagcagcaattctgaaaccaccactagtatcactgttggccacaatttgaacaccacaaaaaggtgtatttggagcacataacgggccataaaaattggcattacaataggtatgttccggagtatatttcaacattctagttctagttcttgaatctgaggttgtgtatattggtaatgtttggaatcttctccagcctaaggataagactaatggatcgttggtcttaaggatcttcttgtgccatctgtgccttcttaatcttgctttaacaactccaaattttaattcagtaggtaacaaaccacccataatgatcgggaaccttggctcgaaattttctatgaattccataggaacatcgtcaaagacaatacgaacataagagccggctttgaaaccttcaattttttgacgttgttcaggagtcatctcctctaattctgctttgttgatttccaactgcttagccatttttgccttttgaagttcataccatgtatcatattcattatcaggatcatcttctttgaaattgtcaccttcttcgatttcaaattgtaaacggaatttttccttcttctctgcgtttaatttacgttcttcttccatggttaaatcttttttttcttcttcctcaaaatcagcaaacgaatcgtcgctttcgttgttattgttgttactttcttcctcaacattttcctgatcatcagcttctaaatcttcgaaatcaccaaaaacttcttcttcttcttcatccatagaattagagtcgtctgcggaattacttctggtagaaccaataaatctatttctgatagaacttagatcagaccatttttccaccaacttttcaaaagtatcaaaataaggaatgaatttttctaaatcggcgatttcagtattctgtccattcttgctatcagtgttattagtttgttttttcttaaagaaatcttcatcatcttcaatatcactttcttctaagtcttcttcatcttcttcatcctcacctctccaacgtcttatacaatcatctggtgatatattttccatatatatcaatttaccgatattccatcttcttttacgcttgatttcgttattcaatttaccagccatggctctttcccaagtttcctcattttctccatcacttaactcgaattctgaatcggtctctggaactaatttctcatcattttgatcatgaaaatcaatttcgactaactctagttctttatctccatccacattatcatcctcatcttcatcgcttggtagattatcaatgtcaagatcatcttcttgaacagattttccataaatttttggttttcttagagaagatctaccttgatctaattcggagttaatttcttcttcttcatttgcatcttcttcttcttcttcccccttcttgtcaactttatgtaattcaataccattactaaaaatttgtaaacctacatttttgaaattttcggcaatgctcctatcaactttctgtaaacttgtcaccaattgttcaccttgacctttctcttgtcctggaacaaaactttgtgaattgttgactttctttgatccaatatcgatataaacagcgtctttatccattagaacaccaccgacatcagacataggggcataaattaatttatccttatcatctaatcttttacgtcttcttacagttggggtagaagaggaattgcttccttcctcttttaattttaatctttcatattcatccaatttctgctgaaaagctggggttggacatggatcaggtagtttttctacttgtgatatggagaaatcaccgacaccagcaatgtgaactttagtaccaccgacagaaggtaaaggagtaccgtgtaaatatccatagagagcgattttcctgtctatctgctttcccttggattggattagatcgggatgagtcagatcagtgatacgatcagccaaaagataagggtgttcatttctccatttcaatggtctaaatttcatgactgaaataaatctactgagattcaaaatttctctatctgggtacctaccattgatgacaccagataaataaaacaatttagcaccctggtatacttcagtccagaatctgtgtttcaatcttttcttggaagctcttaaagttgattgtgacttgaaaagatccaaatgggtggctacaccaagtactcttggcataccatgatgttgagccaaattcaaaaactccatggtttccatttcaaacccgaaattaccatcaatcattaacaaaaccaaatcagcaattttggctacatcgatcattgaattcaagtcgtctgcaggacattccaaaaaggttaatcttctatttttaccagagaccactgtgataggacctttgatttcggtaagagtggtctttgtcattcttcttaccaaagatttaattaaagttgtcttaccagtaccaggaggccctactacacagacaattactggtgggggatcatcatctggtgtacgatccaccattggaacgtgcaatttcttttcatttttgtcacttgatctttgcatttgtcttgccatcttgcctggggcagaaacagcaaaggcctttgcattgtggccctgggtatgtagtttctttttagcagtggatttgttatctcgactctttctatgaggtttattcgactgttccatgttgttgtgtatcaataatatactatttaaaaataaaaataaataaataaataataaatttagggaataaatataggggaagaagaagtactaactcataaatttctttctgtctttcttttttatttattaattactttatttatttaattattaagctgtttttttaacttcttgatctcagaagctattttttggcaaaagagaagagaacaacaggttcaagaaaacctatagaattgttgagctaacaaagagtacttattgggatatgatcttaaggacataagaaaagaaagttttaaagataagatgagatgagatgagatgagatcaaaaaattgcatttacaagcaaatcaaaaaaatttttcaattcaagaaaaaaaacaacaaaaaatatcacacaagaacagagtttcggaaatttcagaagttccgcaacaagcctgttgtttatccttttaaagccgcatacccaaaataggagatctatttacatgtgtaaataagacaagcgtcgttgttgcgtggaaaagaaggaaataggaggagaattttgaatgtgcaaacaataaatgtatatataagactgcaagtgcttatatatacatttcagagaaacgacggaaacagttaaaatctgttaaagccttttttccgcaaaaaagagtttcggattttttactttccgcagatatttgttttcattttgttcgagaaagctgtgaaaaaaaaaaataaacaagaatgaagagtttgtttttaatcttgggtggtgtttttgatgggaagggtagatctctgcgtatgtttatagctgtatgtgtatgtttttcactagggagtgtgtattgtacttgttctatgtatcagagtcagaattatctcaactttattgatattaattaattaattaattaatcagtaaatcaatcaatcaatcagtcagtcagtcggtcaatcaatcaatatatgtgtatatgaacatttcataataattgattgattcattaatggtcttatataaaagtgaaccagtctcgattcccatcacaaaccctgtctcttcaatttcgcatgatcaaatttggtcaattagcgaaactggagaacggtttgtagaatatgcactatatttaaacaggttagatttctataataggaaacaattcgatgcagagttgtcctccgatcacaatttaacattttttgatgctttaaatattgatattcaaaaccttaaaaaaatctttgatctaatacctagtgagttacaatctactttggctaaatatgtttatcaactaaaaacttataatttgtatcagttgataacaagtgttaaacatttgttatatgataaaaatagtaatcaggatactttttctatcggagatacagtcgtgttacttaatgattctgtggaattggacaaagacacaaattgtttttctatcaagcaaaaacagacctttgacgaacttaaagacgcaattactggcgatgttttagtgcctaaatattataaatacttaattgaacaggtttcatccaatgcacataatcatggtgatgacaataagagtaactcagagtatattgttgatgggtcaatgattaaaagaaaaaatgaattatcagaatctaatgagctttctacatcgaatattaccaataatattgaagattcattaatcgaatcctttatcagattattattttgcaattcaaattctgatttattaaatgcattaaaaatgaaaaatattcgtctctacaatgaaataattaattggaatcaattaaatcagccaagtataccaatacttacttttgataaaccagcaacttttttttttccgaccctactctcttcctcttcttcttcactggcgaaaaaatcattagataatactcatgatgcaaatatacaattaaatcaacagctcgataaaggtttaattgagcagattatcataaaggatgatttttctattccctttgtcggtattaccaactatttcgatgattgtttctatttcaacgatcaactagaaaatgtttctgtatcatcaatcaacaatcccctaaaggataactttacaccaactaatacaaataatccaattaataaattaatcgaagtttatcattttttactggccttccatcaagtgttacacctcactcttttcaacttagatgatttgatcacttccattaaatgtacagatccttttgaattgtctggtgagatagtcaatattcagataaatcagttctcagagaataagccacaggttcaaaggagtcaatgggtaagaaaccatattattagagactttatcaattctaaaaatgataagtctgttcagaactatgtaacatatgagattttgtcgaatattccagcaagtaatcaaaaactggaagctatcgggaccaatgggatgagattatatattactatcattatatctttattatcgttagtcattgatgaagaaggccaatggagatgtcaaattgtggaagaatggttcgataataatgatattgatgataatgaactaacgttagattccaaattatcgaacattttaaattataatggtattaattgggcagaaagattgtcgaaaagagagtttcgtaatggttattggttgattattttattgggagtcttgcaagatagcatgcatatatcaaagtatacaaggattgtaatgaattttactgaaaaaattgtgcctgaaatgttggatggtaatgttcctaaaaatatcttcttcaatttttgtaaaaaactgactatttcagagaaagttgatatactttgggtcttgacggatattctagcaaattattcagatgacattaagaaatggattaatggtgtaccaaagttagtcaatgaaattagatatgaaagaggaaggctagtaaaatatcagactgcagaattatcaacattatctgaatgggaacctaaattggaaatatttaaaggtaacacaaacttagattccaacctggttaagactatggagatagagattgataatattaaaaataatatgaaaaaattcacttcggaaatagaaggtctagattatatgataagaaattatgagggtgaaaatgtgcaatttttaggtgttgatagattttggaataggttttattggataaacaaaaaagagcatgacaatatttttgaaaaatcggttgatatggattctttatattgttgtggcagattatggatacgaggtgggttaccagaaagagtaaagtctttgttaaacatcacaacagaacaatatgataaatggattgaactggctcaaactaagggaaaagcatatgctaccaaagaggtatttggtgtatatcgtgattcttcaggtacttattatagtgtggaaaatgaggtccatgtggaaatattttcattgaaaggcctaattgttggtgattataaactttctaatattcaacaaaaaattgtcactgagggtccagagaatttgctactaaattctaatgaatggtactttattaaggatgtttcttcaataagaaaaatgttatataatatgaatataggtggatttagagaaacaaaactttataccaaaatactctcattgttacccgaaattttaacttcttttgagatcaaaaataatgtgtctggtattgatacttttgatataatagaaaaggaaattttaaaggagctacaaaaatatgaatgtaatgaagatgaattgaaaaacttgagatacttaaatgaaaatgactataacaagggtaataaagagatgataattattaaatctcatgaatatttggaaaaattagcccaacagataaatttggtgcacgatacaaaacttaccaagaggttgttacaacgtttaaaaaaattagaatatagaagaagactattttttgaggaacagggcactaaaacaaatataaattacattggtatcagcacactgaattatttggaacaagcagacgttaatgtgatagccaataagaaacttcgaaagcaaatggatcttctaacatatcttttaaattataaacattttaaaggtattgaaactttaactaagtggaggaattctagcgatgtattgacagcgataaatggcaaaatacaggtagagtcacttgttgtagaggatttattgaatcaaatactacaaaaaattaaatctaacattacatcaaatgattgggttccgactaagatggatgcattcttgcaattggagactatgtcacaaggggttcaatctgttattcaacaagaacaaattcaacaaattaccacgactacaaatgaggtagcatctggcatgcaaaatatcgtacaaagtgggacaaatgtgtcagatattcaaagtgcaaatgcaaatacaaatataaatacaaatacaaacagtaacaacagtcttattgtaattgatggtacggtgaagtaagttgttataacacagaagtgacattaacatacttgttaaatgcagcaatgaatatgtacacagatatatatattatatatgtacggcaagaaaggaacaaatttaggttgatatagtattgaaaggatacaatatattatttaactagttaaaataactgtcatcctgaagagtcttatattaaggattattttatgagtaacaaatccagtaatttatttaattgtcgttgttagcatcttcttcttctaagaatagtgtactgaacagaagttgagacacttttcttctgtttttgagctcgtatgatgacaaaaataaagatatttttaaaatatgaaaaataaaccaaagaggagaaaagaaacgttttaattctttaaagttattattactactgttgtacgaaaggttttttgcaacaattaaggttacataaacaaggatagctaaattgttccgtattcttagtctaataatcatataaaaagttatcagcgttcacagtttgtctggttaaagctggaattaaagtttttgtttatttttgctttatcccttttgtggttttgtcattcaaaaacaaaaaaatagaagtaaaagtgggatcaatacaaaattacaatgttaaagtcagttttagatgttggttcttgtttttacaaactagattcgcattctaccctactatttaaaagtttaaaaattgttaatcaatgtaaccagatcagactattgagtagtaatattatcaactatcaattgcaagcaaaggaaaaaactcaatcaaagagaaaaatagagccattagtacgttctaaatatgaatccaaggattataaattgcctaagtggaaggagtcattaggtgaatttgttattagtacatttcgtttagatatggataaagttagggcaggtcctgtagctggttcctattattatagtatttgtagaaaacaagggctccaagtggaaggtgaagaattgtctccatcagcaaagtatttctatgaaactctaagattgccaaggactttttcacaatggttccaaatcactgttttacatgaatggatgttgttcactagaatgagagctatgccatttaaatatggtaggaattatcaacaaaaattggttgatagaacattttcggatattgaaataaggctgtttgaggagatgaatattcattcagggaggattgtcgatcaatacttgaaagattttgacactcaattaaagggggctgtactggcatatgatgaagggttttattcagatgatagtactttggcaacagctgtttggagaaacttgttcgctggtagaaaaaatatcgatattagtcttttggaagatgttgtcaaatatattagatctcaactttatattctaagtagaatgtcagacagagagtttgcattaggtaaatttaactttgttttgccaacagaaacggttaaaagattgactccagatgaagaactacagatgaagaagagtgttattgagaaatataaaaagcttgaaaagagtgggttgatgttacccagcgaaaaaagtaatctttcatataccaattaacttaaatatattcaaacatacataggtaaactggataattgattttacttatacttgaagttagggctatgttgggttggggtggtaatatttgttttattttgattcctgtatattttgtcatttgaacttttgtttatttatttatcatgtttatatttattcctacataaagattaatatcattcttgaaattaatgttttattttttttatggttatgcatatctattcattatataattatagaataatttttgtcctttgttttttatttctttaattattactagttaaaatagtttatagttatctacatttttatagacgtctcactttagcagtccattcttctggtttattttcattaaacaactggtataaagcgtcaattaattccacatggaaactaccactaccacgagcacgggtagatgctaatttaccagcagacttgtacaactgaacagcacccacaattgcgtcaatggcaataccatcttcatttaaaccaccgagtaacgaagcgattgtagaacctaaagaacagccactcgcagtaatgtcacccataattggaataggaccattttcaactaaataacaaggtaggtctttggctgtgataccatcagtgcctgtggataaacttaattttcctgataaagtaccatcagcaatgaaatcagtctcacccgtacatacgacatatgtcctatatttataagccaccgtttgagtcgctaaggctaacaattcttttgtaacagcttcagtgcttgtagcatcaacccctttcattttactggaagttagaccagaaagagcaagaatttcactagaatttcctttgatacatataaactgactatatgttaatagagtatcatttaatattagcctggtttcagttgcagaatatcctactggatccaacacaattggccttttaaattcgttgtaagctttaatagcagttgttaaagtagtcactggtgctatagatccagtatttattaacaacgacgcattgggaatttgagccaaatccctaacttcagattctacatcagacataattggagatgatcctagagctagagttacattggcaccgaagttttgatgaactttattagtcatatgctgaactaatggacgagtttgtttgacttgtgaaattacttttttgacatcagcagcagtaacattagatggggatagttgaaagttgacaaatttgaattgggtaccatcgattattttacgtaaaattactgtagaggtggcagcatcaggtgatgccataatatcagatactaatgagataccatctagggatcttttaccattggatgcattacactgataaatgactctttcaatacaatcaggatgtaaccctccaatagctacagtcttgcaccaagtggcaccactatcctctaaagcagttataattttagaacaaccttgtgggcccataggagctttctttagatttttctttgtggcagttgggaaaatagttccaataccaatataatcaatcatatctggaccccatttagccaattgttccacctcatgagaaaagtcaacactccaacctaagatcttgtcaggacctaaaagctttcttaccatggggacaggcatatcatcttgtcccacatggataccatctgcatcaattgccatagccacatcaacacgatcattaataattaaaggaactttaaactgatgacataattttttgatttgtagaccttcttccacgaaattcttagtgtcagtgtttttttcacggatttgcactaaggacacaccattctctaacccggctttaacttgatcatataaagtctttcctggtggaagcatagcagaatcagtaaccaaataaagtgaataatttacatcttgttttggaataatcattttgtttttttctgttttttcatataagtaagtatatatttgatattcctatgtatatattttatcacttctttcggtaaaactgctctgtgtgacaaaagtaaagtcttttcaaaagcttacttcacataaagagaataaatagtccagttggtacagctgcggtcaaagagtcagaaacttttaatgctacatctaatagtagtcattcttatatttgacgatttgaactgaacaaatgaaataaaaatagttttgaggctctaagagtttctccttttgaaaaagaaaaattactataattattgaaaaaatcaatgaggtgaaaaattattatgaatcaagtcagactagcttgaatttttggaaactatcagaatttgttcaaacaataagagagggtaatacgtgtattgtcaatacaatatttgctatcatcattgattaagtcaatccaacttaaagagttagaacattagaatttatttgttatttttatcaagaaaattgaagtatatatattcaaagatagtcgatgcaacatgaagtttacgccaagtgttgttattgatgcacctggctactatgtggatcattgcagtggtggcaaaaacacagataaatgtatcattttgagagataaacaattggaaagtgactctgagtcgatgccagttagtttgaaacatttatcaaaaccaacaaacattttggaccttacaaacaacgaattaaaagaattacccaatttgagaaatcgtacagatattcataccttactacttggtagaaatgatattaaatatgttaatgggaaaggattgccaagacatttaagaaatttggtgttggcaaataataacatatcatcaatttcacaattaaaaggattacattatgctcctaaaacattgacaaatttatctctacgtggtaatccgatttgtcatttgcaagacttcaggatacatgttataagatatattccaaaattacaagtattggatttccaaaatgtgacaaaagaagaaaggaggttggctaattcaaagattgaaaaccgtagtgatatggttaaagatcaattacaaaaagtttctgttcctaagaatagagaaagaaaggataaaaatattgaattgatgaattttgtagtagggaagatgtctgaacagagaaagaaggagctaaaacagcaattgtctaatgcaaaatctttagatgaaatcatgaaattagaaaaattactatctggatcttgattattaatatcatgtttgttttttaaaatatggttctaccattgttaccagcgattactgttcttatataaaataaagtggtgatgagatttacaaatataatgagttcatggaaaatatttttttaggaattatacatacgaaattattcttgtttcttatcgtttaaagaaatagaaaagcaattgttgatattttggacagaaaagttagaaaaatgtgaatctaatattaatgcaatataagttaaaacttctgtataagcatcatttttttccttcatatttttgataatatttactgttatgattttttttatgtatatatagttgtacataggtgagtatgttattcaaattaagctagatcacgctttgttcacaggtattgtaaaatagtattatttgtttaacttatttaaaataaattaagattaattttagagattaatttttgaaaggtctgtattaacaagtgttagtgtttaaatatatattctgtaagaaaaattgaaataaatattattttatcgaggataaatatatttgaacatgttattcttttttttttactccgaggtaagtatatattattgctgaaatcgaacgttctagaataaataataggccaattagattttagtaaacattaagtgatagtaaaatgtggagaatgtaatgtttgcttatcagtagatgtaaacaagccttgtcaacaatttggtgctatacgtagacaagatagaccaaatatgaaaatatataaaaccagcatttttttaaaatcatgttgctttccttgctcatcttttataatcatccttgcatattatatataaataaaaagtcgaaaaacttaatcataattttgtataatatatatatataacactgagaatgtatactatttatccaattactacaggcgctaattctcaaaacttacaatttaaattaaattataaaaatacaattttagtaccagatagtataaaaagaacaaaaatcaaagtagtatgataaaaaaaaatttaaaatgaagacaattttaataagttatgtgtaggatttgactttgatatttattgagttttgttttgaaactgtaaggagccctaactggaaatcctgaaatacgtagtctgcgggtaacccctaatatcgaggtgaaggacttggaataaccgaaactctgggcccaaggttgtgagtgtatttgaacgaacatatgatcgtcggatgggcattggtggcaaattattaagaagcttacttaaaaaacccttgattattgagagatagtgccagaggtaattatcagcattaatattcataatctatttaataggttaagaagaacaagacgactatccaagactaatctatttaatagttaaaaccaaccaattatataatttggaagtgttgagaatgagcgcctgtattcattggatatatagtaaacattctcaatattgtattaaacagatttaggatacaaaattataataaaattcttcactttctttctctatatacaacattgaaataataatacacaaagattgtaaataagataaaaataatgtatgatgaaatctttggctttatatatgttaacattaagccatttttctctacaaacagtaagatatttaataaacagactcaacaacttttggtaatctctcaatgattattactcaacaatttatcgtttagcgtctgctaaaatcttattgttctatctatttcattatagaacattctattttaacagtaactgtttatatatataattaatatccatattttagtatatcacttgagataacccttacagagacactctttaattttttttcttcattttatgttttggaagtcttttcaattattttggaaaattttttgacaatgaaaagttccaaaatacaggcaatatatatattaacaatagtttcaaattatacactcataacgtacacagtatttggcccttatctattatgcaactatacaacttttttttattcttgctggcttatttaagaccaaattaatataacccatatggtaacctgttttagaattttcccaataattgcaagtcacttgattgagtttttctttaatatgacacaaacattagttaaccaatcatttgaacatacccaaagcttggaatccaacactttgcttgttacaaatcgtttatctttacattacatgatagtaaagattatgtattccataatattcaaattacaactttttacaaaaagatattaattctactagtagttggttgaagttagtacatttatttctcaacgtttctagtggatacaattatcattatacaaaaatataggataaatccttttatgcaaaatatcaatataatatacattctttataaatacaaaataaaaaaataaataattacatgagaaaaagtagtaatatgttagttataattatttatgattttacttccttatcaatgaattcagtgtgttcatttgcatctttagtttcttctttaatttctactttagtctcttctttagtttcattttcatttcttgtttcttgcttgttcttagtgattagcttgccatctttatcaatacctgggatacctctagctgttaaaaattcaaaaatacttttctgaacattagtaccctttttagtttcactctcctccccattagcaccagtaactctggtgaaagaatcaatataagtgtaaaatgcattaaatacattatcatcaacttcttctttataaattttatcataaatatgcttcattttaaaggcgtcgatctcttcttgatgtttactaaaatcaattggatcataaccgaattgttgtaaacgagaattataaccatcataaacaggagcttccaatagtaatcccagtgctggtgcctttggaatattaattttctgcggaccataggcttgtgcaatacgttccgccggagtaccgcaacgagtaaccatggtagccattgaaatcattttacggatttgatgtaacataaatgattgcccatgaatcttgatagagacccattcagtctttgcatcaccaataacaaatggttcagagactttaatttgtttcatgtatctaattgcacttgagtccttaaaatccttaccttgtgtgaaattgtgaaaattgtgagcattgacatactgtttcatagaagaacgaaatttattcaatttttcctttgatatacggtattgtctacgtaaagaattttctaaagctttgtattgtctaacttttaagtaaatttcactttctccatcaaactgatcctttggaggtggaacgtaatttttaatctgttctaaatcttcttttgaaaatgtttcattacatttctcgttaaatttttgccaaaactcaactgattccatatcatcatccaatacaccaggatactcttttttacttttttctaaatcgttgtataaaatagaatttggttttggcccgatcaatgaataagttggtagcagatattcataccaacgagaactacacatctttctacaatcaaaagctttattgactctgctaatatcccatactctaataccttcaggtaaatgctgattaattttttctttaatatctggatcttcaataattaatttaacagagatcagattaccacctgcatgaacacctttatcagttctagcagctctcataaatccattctttttcaagtcctttgcattatcttcagagattgcacctgcttcagcaaaagctttaaaaagggctccttcaatggttggatttggtgggttatattgcataccacaataacctgtaccacagtaaccaaccataacagctactttacgttttggcaatctcttaggttttggaattgggttaccattttcatccaactgtgaaggtctacccactctttgttttttcttttctggctcttgattatcctctttgccactgaccttattttgtgtgtttttatcttcatcaaaatctgccttccttgcctttgtcaatttactgatggcgcctctttttaaagcattttcatcttgttcgtcatcgtatgatggcataagtgccaaattttcagaagacatcttctagtgactgcaaatgtagatttatcccactgtttcctgttcactatacagaaaaccaatatttccgtagtgcatgcactgtatgagtacaatttaaatacaaagagaatacgagttgagatgagatgagatgaggtttataaaagtttatttatttcttttttttttcgagaaaatttttcttatctatatttttttttcaccttcttcctttagataatccgcgaaaaaaaaaattacacataaaatacacacatccagatactataaaagtgtcacattctttcttttatttaaagttatatggagaaccagccctttttaaagagtgaataggtgagcaaacggaagtataggaacatcaacctataattatgcattcactagataatgatacaagtctattacgcaaaagtttacgcatttaagaaagtatgttagggataaagagacagtaacagtttctctttctctatttagcaactaaacaaaaaaaacattgtacaaaatatataataagaacatattactgtgaatcagattatgtgattaacatagatgatctcctactatatacacatgtatttcaaatattatatagccttgtctgtaggacattattgttaataacattaatttatttcatataatactggcttgtaccagatcactatcaacgagtcaatgtcaactttgaaatttcttcttttttttattttaacttgcaagaaatacaagtagaggtgaaaaattggaagagtaaaagaagttttgcgatgaggttagagtatcgaatagaatatgacccttgcaataatatactaatgtactgaatctgattaccaatcattatctgattttactttcttttcctttttaagcttataacaataccaaacagcatacgggataaacactcacattaacggacagtagcaagaagaacaaaaataataataatgagacaacttactgaagatgaaacaagagtagtctttgaaaaattggcaggttatataggtagaaacatttcaaatctggtagacaacaaagaaaacccacatgtttttagattacaaaaggatagagtatattatgtgccggaaaatgtagcaagattagctactagtgttgcaagatcaaacttaatgtcacttgggatatgtttaggaaaatttacaaagactggtaaatttagattacatataacttctttatctatcttagctcaacatgctaaatataaaatatggatcaaaccaaatggtgaaatgcctttcctttatggtaatcatgtacttaaagctcatattggtaaaatgtctgatgatatcccagaacacgctggtgttataatcttttctatgcatgatatcccattaggttttggtgtatctgccaagagtacatctgaatcaaaaaatttacaaccaactgcgattgttgcctttagacaagctgatataggtgaatatttaagagatgaagatacacttttcacttgaaatttttttctatctctttttcacatacttcccatatctaaatacatagatatatttctatttctgtgtctacttctatattacgttatgttatattttactgtactatataaatacacacatccacaaatccatacatataaataatatacattaacatttcttaataaaaccccaaaaaaagaggaaggtaaaattaatatatatatatatatatatgtagttcaatgaaaatgtccagaaaattatcataatcagaaaaagtaacactcttcaatataagctctcattttttgcctttacctttgctcttccccttacttttgctcttcttcttattattattggtacctttctttgtaatatcaaacgtttgttccgatttcttattcattgtaccaccctgtgtctgtttggataactgttttttcttgggtttatatgttgatctatctcttaatggtaaccatctctctggatctggtttattattcaaattaattgaatcactacgtttagctaggaattttttaagtttttgtgcctttcttttctctttttttgtcttcaatttatgtttaagaatcttattatgtttatttaaattacttttgcttttatctacaattgattcgaatggcttaatgttcaactgaattaaccttccaacatcgacatcagagactaacgaagctgctttgtctatatcaaattgttcttcattgattacagattgtatcaaagcatcattctcgttattctccatcttttctaagaaaatttttttggctttgccgatttggtctaagtttaagtattggaaaccaatatatctccataaattataatctgtcaatttgcaattatccattaatttatttaataattgctccttcatatagtccttatccgtgatgtcatataattggaaaattatataatagataaagatggataaacgattatttgtcaaaaatttatcttgtgataaatatatttcacataatctaattgcattctcatactgcttttccttgtataacatctgtatagttaagattaataaaccaaagactaaagaatttgtgtagaattcgtttttcttttcaagacatttatggtacaatattttagcttgagttctgaaaggttcatatatgatatcatcaataatagcaccatacaacttagaaacattcacataattaaaagaattactatttggtttactggttgatttactgtataacttcaacatctggtagtttcttttcaataaaacgttttgtgggtatgtaaaatatttagaaactaatgaatgaattctttcaaaatttaactctcttagaatcaaattaaaattatcttcatatttagataaatcccgcaatgccatataattaatctttgcaattaaatatagtggattatctgctgatattctatttattaaaggttttaaaatctccttacacttaccattttcacctaacaattgataaacatatgacaattgtaattgaatagcaaagatgtcattttcataatcttcctcaattgccatttgtaaacttttttctaataattcaatagcatccaaatattgaccccttgaagttaaaatcatagaatcgttgaataataaatcatatgagtctggattagattcagataccaatggaagtttttcttgtagatgtggattggatgccaatggaactctttcattacaagccaactcaattggattatccaaacctccagagttattagtctttattaaacttctatacaactcatatgctcttgaatttgtattcgaattttttaaagcatattgggcatataaatgacttaaccccctctctaatgagtccttattaacattatctttaaccctttcgtatattcccaacctctcaaaatcctcaaatctattaatcttatagtaaatgtaaccaatttccatgatcatttcatttaaatctaccttatcatctttatacttattcaattggttaaatgccctttgatatttatcttgtttaattaaggaaaccaacaagttttttaatacctgagttttattagtacaacctccatctaacaacgcaatacaagtagtttcgacgtcaacatgttcattttgacttgagtgaacatctaactgtttcaaaagagaagacaaagttggaggtgccattatatatatatttttttatcgtaatctgcaaccactaacaattcttcctgtcccaattggccaattatccaaattaacaactaaaaaagaataaaaatgatattgaactcttgcaaagaaatactgttttatctaacattatccaaaataatgctttctatatttttttcttttcttcttctatttcttccctactaaaaaaaaaatttagtaaacaactttggcaggaaaaaagagccgaaaagcttaaaaatgaaaaatttttaagaaattactacggaattaattccgtttgtttagagcctaataaaatttacaaaaccgtagcggcatttatacttgagaaacggaatacaaacataacgacatcaacacatacatgaatataatgatccttcaagtaaatgaccaattgtgggtgtcatatttccaacttgatagatttgttatttttatatctatataactgtttaatttactgtctgtattgcaataataaaactaatagcttaaaatcagatgacagtaaaagaccaaatatttgcatacttgataaaaattaaaaatgattgactattctgagttatctatcaaagaaaaacctatatatataaaccaagtctatgatttctttcttctataaaggatataaaatactgtgcatcaggggatagtcaatatgaaagtctataacaggcccaacttttcatacaacttaaaaacatatacatacacacatacacacacacatatatatatttatgaatattattatttataatagtctagtaatagctataaacataaaaacaagtaaagagaaacaaatagtaaacaataatagaatatgatcttatcaaaaatgtgattagaaaaaaaagaataaatccaaccatatctctactctctctcttttcattcttgttttctaacatatatgcacagatcttcataaatgagaaaatagtatcgatcttgtctagcagtgtagtatatactaccaaaattctttatttctaagaatccatgggtgtcgtttaatatctctcaaagataatctgtttcttggttcagtagatagtatacgtttaattaaattctgtgcatccagggacattgttgctggaaaatttatatcaactttcataatacgcttatatgtcatctcttttgtattctcctcaaatggtggtgagcctacgagcaattcatacattaagacacccaatgcccatatatctactgtttgatcatattccttcgatgtaatcaattcaggcgacaaatagtcaatggtaccacacagagttttacgtctagttccatatggattaataatactccaaccaaaatctgtcaacttgacttggttatttggaccaattaaaatattctcaggttttatatctctatgaataattcttctttgatgtaagtattccaatgcatctgcaatttgataaataaatgatgataccataatatcattaaatgggccatgtttttctagtagtttatataactcaccgtatggcatatattctattagcatgtaaactcttttctcatcataaaaatatccgtacaacttagcaatgtttggatggttcagtgatgcttgtatttcaacctctctaataaactgtctttccaatctataatgaataatgtcaatttttttcatcgcttttaaagcacagataaatccactctgtatatgcctaacacaatacacattaccaaattttcccttgcctaatttaagaccaatttcaaaatcctgcttacttaatggtttaattttcagtataggtgattttatataatttgtatttgtacttgtactagcaataacagtagtatttgattttttggtattagaatcctcgttagaattatcatattgatttgattttatgggggagttatcttttgatgagactttataggaattataggcaacctcttttctaataggagataatgaattagacggcgaagatgaagaagtaataccattttttttaggtgacgctgataatttagaatatcttcttgatctcagagtattcttcagagttcttcttttagatggactaattttagaatttgatgttgaaattattgaaagcaccgttttatgttggtccagtgtctcttttttattcaatcgataacttgacacagttctattagtaaaagacatagtattctcacagaagaaatccaacaaaatagcaaaagcacaaccaaccacggctacaactacgatatattcctgtaaaccagaaagtatcacttatctcaacttgtttgcatacctctttctgaccttaatctcctctcacttctaatagccacatgttttattatatcttcatcactgtaagaaggtctgtcaatgtaataaatacagatttcaacaagatcgtaatttcccaaactaaaaagagaaaaaaaaaagaatcgcaaagatacaaacagtttgaagaagtgatgtgtcttaaaagagattaaaatgttataaagttagattggctaaaatgatgtaaaccagtgactgcaaatatatagtatttattagcacttgttgttgataatatacatttctaacctgctgatgttatatacataaaagggtttgcaacagaaaaaacttgcttattacaatggaagaattattaagatggggtcaagagaatggcattcagttacctaagggaatagaatttatcaaggacgaaaagaagggatttacttgtatatattccaatccacaagatttacaaacccctagattcattgccccattgaatgcattgatcattggtgagctggcagagaaggtatttggaaccaaaaataatggattactgaagtttctattagctaaattaaaatatgatagtaatcctacactgattgacaataatacccttgatttacagaaaaaatttgctccatatataaacgttttgcctacagtaccagactccccattaatatggaatcctcgagaaattaatcttttaaaaaatacaaatttaggtaactctatcagagaaagattatatgcaatcttcgagcagtggcataatttaattaaaaacaatatttttttacaatcttttaaattgaacattggaaatgatttggaattgtttaaccaatgggacgaattatctatgcaacaaatatatgatgaaatcattttaaagacagttaattccactccaacccattggtgttcattttcagcatatttatggtctcatcttatttttacatcaagagcatttcctgaatatcttatcaatcctaaaaattgtgatgagtactcgattatgctactacctattatcgacttattgaatcatgattatacttcaagagttgaatggtccacaaacaataatcgttcgtttattttaactttgctaaatgataatatagaacaaggcgatgaactgttcaataattatggtccaaagggtaacgaggaactacttaacggatatgggtttgtattggaagacaatatatgcgactcagtgactttaaagattaaattaccgttacctgtgattgagaacattttgaaaaatgaaccatcaatatctttaccaactattgatgattatacaacatatgcatttgaagttgatcaaaagagtaacctggcagatgataaaactcgaacagcagaaaattacaaagatggaatcacatatctattaaatacaagtaatgacacatcgttgacatctctattacaagtattcacatttttatctaagcatgattctgaaatagtatctttttcaattagagcaagattagatggattacaagggttgagaaatgctcttcaaaataaattacacattttaaagtataaagtacccgaccatgaatatttacaatatgaaattgatgagtatagaagctattgttcaaaaatatatagagagtctcaaataaagatactgaaacattctataaatgtattgaaaaattgggaaaaacaatggttaaaagaatttaagccacaattattgactatggataaaatattgaaatatgatacaggttttgttgaaactgagttaccggcatgctttgctgataatactagcgacgacatttcctttgattccacatttgaccttttcgtcctatggattgctatcaagatacaaaaccactcatttattgaaaaatacaaatcagttcaatcagatctagagtcatatattgcaagacactctaataatgaaaaaaagtttacgatcaatgaagatacagtttccttctacaacacatatttcccacaaaaagacaagcaaaataaaatcaaaattgaaaatatccatgttgctcttaattatgttagagataacagtttcacaagatcgagtaagcttcaagagaccatccttgtgacttccaataaataagaggtatccaacaccaaccgtcacaagacattttgtagggttaactagaagcacaaagaaggatgaacaaaacaattatatatatatatatatgtatgtatgtatatataatagtaagtcccatccattatttcaataatgctctctctcatcggcggattctttttttctctcgagagttttaaccacacaaaataaaataacaggaaaaagaaacgactaaaagcgatgctctgttatgaaataaagaaaaaaactattaccagtcatttcttttttctattaatgacttaagacgatgggagtttagtcaaggtagaaaaattcattaattgtaacaacacaggtcatacaatattctcgactaaataatcctggacagtgcttgtgttaggcaaagaaaatcatattgattgttcttaaacttttgacgacatatcggagtcttctatacatatttctgtatacttttgactgggttacaacatttacttattatcaaacggaacacaatgaccttcaacaatcaaactactgctacagtgataggtttcattggcatctatttgtattttggtggtagattttctattgccttggtattatttttcagttatgggattctttacactgaaaataagaaacttgaaaatgctgataataagataaaaccagcacaagagccattaaagacagagaagaagaaacatgtatgtatgtgtggtaaaaatggtggtggatgcggtggtaaatcgaaatctgatactaaaaaaaaaggttgttgtggtggtaaaggtggttgtggaggccttaaacatggccacaaccatacacatagtgatagttgtgcacgctctgagaagaatgatgaaaaccactctaatactaattccacacaacagaatccaaaggatgtggatgaattggccgttgatttcacaggtgctttcaatacagcagagaattctcacaaaccgttaaaaaaattaccaaagatagtaccaaaaagaataccaaaacgttttagtgcagaaaagaaaaaaaaatcgccaactgaaaagtctgatagattaattaaaagtgcattaactgtttccaatgaaaaattattgaagtcggatatttacattttttatagttctttacaaggtgctactgaaaaggctgctcgaattgttgaaaatgaactaatgaaagtcacagaattagaaaaaaaaccaatcctaatgaatttggatgagttagataatattgatgattattttgtagacgttccaactgaaaattctttatatgtgatagttttgccatcctatgatgtggattgtccattagattatttcttacaaacattagaggagaacttttatgatcaaagattagatgcctacccattacgtaagttagttggttacacagtattgggattaggtgattctgaatcatggccagaaaaattctgttatcaagccaagaaggtagaccaattcgtagccaaattaggtggcagaagagtttttcctgttggtaaaatatgtatgaagacaagcggtaatgaagaaattaaaagttgggcaaatttatttggtgaaatgttaaaagaagacgaaccaatattgtacgaatatgatgagacagtttcagatgcatatgatgagtcccctgatggagagtcaaatagtgataataatgacaatgagcaattggccgatgtagaagatcttgcaggttccgattcaaataaatgctcaaagaatagttatgagattaaacaaatggttgcaaagaatagtccaacgtataaaaatttaacaaaacaaggttataaaattattggatctcattctggtgtcaaaatttgtagatggaccaagaatgaattgagaggtagaggttcctgctataagaagtctcttttcaatatttcgtcaagcagatgtatggaattgacaccctccttagcctgctcttccaaatgtgtcttttgttggagacatggaactaacccagtttccaagaattggagatgggaaatagatgaaccagaagatatactggagagtgcattaaatgcacattattctatgattaaacaaatgaggggtgttcctggagtcatggccgatagatttgctaatgcttttaaagtagcacattgtgctttgtctcttgttggtgaaccaatcctttacccacatattaacaaatttattgagctattacatgaaaaggaaatttcttcgttccttgtttgtaatgcacaacacccagaggcactaagaaacataggtaaagtgacccaattatatgtatctatcgatgcaccaactaaacaagaattaaaaaaagtagatagaccattgtataaagacttctgggaaaggatgatcgaatgtttagatattatcaagactgttcaatctcatcaaagaactgttttcagattaactttggtgaaaggttttaatatgggtgatataagctcctactctgatttagtagagcgtggattaccatgtttcattgaagtgaaaggcgctacattcagtggtgcatccaaaaatgatgttaatagtttgaccatgcaaaatattccatataatgaagaatgtaaaaaatttgtagaagattttgtggctgaattgcagagacgtagattaccatatgaactagctgcggaacacgcacattctaattgcattctgattgccaatagcagatttaagattaatggtgaatggcatacacatattgcatttgataaattttttgagttattaaagaaaagtgatgatttcacgtatatggattacttagagaagactcctgaatgggcattgtatggtaacggtgggtttgcacctggtaacgaacgggtcattagaaaggaagaaaaattgaaaaagaaattactgaaggaacaacaaggatctctcaaaagtcaagaaactcactagttacataacagagtatcttattataataatgcatacattgtttatactaaccaggtcagatatatttatctcaataatatgcttattatattatagttcaaatcaacactaagattatatatatatatatatatgaataagagtaatatgtgatttcttataataatttagtcataacatcattaaaagaaatgaatcaattttagtaatttaaatagcaagcaagcaaaggatatccctaatatttccttatcaacccattccgaacatgctaaaacagcaacaaatctgtatattttagtataagtataaaatctgactccttcccatgaattccatacaggagtataatattttcctaacaatgatctatttacgtcatcttgctcaggttttctttgtagagaatcatgctctttataaacttcaataatatattttttagtagttatgatattatctgtcacggtgccatatacaggcaggccaacaatatatttgaagtcgatcttattgttaatagtccatagaaacaatttaacgtccttctcaagtaaaactgagaccataatgtctctaaaatattgagtccaagttgaaatgaaatgaacactaatcccatagagtttataatgtggattatttaatttatttgaataatcgataaattggttgacaatatcgagtgacatagtgataacaatgattttgaaatctttaaaaacattagtttgaacaccaaattcaaaccaatccagaagccaaactccccaaatcagttttgatctccagaaatcgagatcatttttaacatcaagaagttcagagtaaatccgtaaaagaatcaatttgtcattggtgaatttgatatcgagcattaactgacaatttggatgttctaaagaccaaaataacatatcttttaaagtcatcattctttgagagggatcagacttatttttcaaagttctgagttgatcccatgtggattcggatatcactaaatttttatcccatgttctaccagtatcggaatcatgatttataacaatgacaccatcaagtgtcatttgcagatcagtttcaataatgtctacattagcttcgtatgctttattaaatgctatcaaagtgttttctggatataaacctctaaaagctctgtgaccaaccatctgtatagatgggatatttattatttcactcattttctctttcttttttttaagtttttgttattattgttgctgttgttcttaatgcctaatttttgtcagtattccccttcaatgtgttattctgcataaacttaaccaagaaagtctcaagaatttgttaagtacaaccagtgcagctaagaaaattatgggtatttaacatgtttgaatgtacttgcaacatatatgtattatatatgttattttatttaatcctttaatacatcgtttagtgtcatgtgttctcccatcccaattgtcttgtcgtttcttttttttaatgttttccctgctttttttctttctttctttttcctctcttcctgtatcctgatgttaacgtgaggaggcagagacagagagagagagcggtaaagagagggttacattcgaaacaacctttaattaatatatccctttatagtctactttggatttccaagatttaaagattactttatctccgtctctttgtttctctctgtgtttatctcctcccacctctacaaagacaaagtcttcccttacagattatcactgtatatatcttcatctgctaaccgtctattatattccaaatatcgtacacaaacctcatcattgcttctttttttcttctcttttttctttttgttaattcccccctccccctaacaactccgtttttctcctgggaaaagcacacagaacgtctgggctgaattttctattcaaccctacatggtttctcttcttcatctgtagaaaaatatcttttgatatgataaaccctaaatgcttgattttgtcaattatcttgtatacacccatacctccaatgttcttccctgaaacaacagcagttcccaaaagggaaaaaattggacacagaaacgaagaaggaaaaaaaatttttttttttgctgtcgaggaatcattatgtacgaacagacaaaaacaagaaaaacaaaaaacaaaaaacaaaacaaaaaaataaaaaaggaatgcaatcgtgttgtgtagtgctgttgagcatttctattttttctcagtataacatattcgaagaatgaaacaatcagttaaatcatattcccccataaacgttatatttttaattgaatacaaccctcggaatatttgtttacttgtatgcttgcatatcaaagtattgtgaattttgtctgaatagtaaattcgtctttcgcaactaacgttgaactgtatttgaaagagtgaatacgcaaatatatatttatatttttgattctacgagaccttatcaataaactaagcaaatggatttaagagtgggtagaaaatttagaattggtagaaaaattggtagtggatcctttggtgatatttatcacgggacaaatttgattagcggtgaagaagtggctatcaaattagaatccattcgatctcgtcatccacagttggaatatgagtcccgagtttatagatatctaagtggtggtattggtattccatttatccgatggtttggccgtgaaggtgaatacaatgcaatggttatcgatttattaggcccatctttagaagatctgttcaactattgtcacagaaaattctctttaaagactgtcataatgttggctttacaaatgattttcagaatccaatatattcatgggagatcttttattcacagagatatcaaaccggataatttcttaatgggaacaggacgtcgtggtagtacagttcatttaatcgattttggtttatccaaaaaatatagagattttaatacacatcgtcatatcccatatcgtgagaataaatccttgacgggtactgctagatatgcgtctgttaatacacatttaggtatcgagcaatgtagaagagatgatttagaatctttgggttatatctttgtctatttctgtaagggttctttgccatggcagggtttaaaggcaacaacaaaaaaacaaaaatatgatcgaatcttggagaagaaattgagcgttaatgtcgatactctatgtcaaggtttgcctgttgaatttaaagattatttgaattactgtaagaatttgaagttcgatgaaagaccagattatttatatcttgcacggctttttaaagatctttcaataaaattagaatatcataacgatcatttattcgattggaccatgttacgttatactaaagctatggtcgaaaaacaacgtgaactattaaataataataatagtaatagtaatagcggtagtactaaccaaaacattaatctaatcacaaacaataataataacaatactactcaagatccaaatggtcaaaatactaataattctcatattacaactacacaagaagataaaaatgaagcatttgaaaagataaaattgttaactatgaaaaaatttgcatctcatttccattattataaagtagattgtaaatacaatccgactccagaagaaattaaacaacaaaccatcgacaataataatttgatttcttcattgccacaagaattgttaaatgctgtggataaaggtatggatcaactaaaacaacaacagcagcagcaacagcagcagcaacaacaatcaagtgaacaactagacggtcagaacttacatctacaacaacatcaagaaacgttattggaacagcaaagaagagatccaacaagacaatatattcctactgttcaacaacaaataaatagacctgttggttctactcaatatcctcctcagatttctgtcccaggacacatacaatcccgcataccacagcagcaacaacaacaacaacagcagcatcagtctcaacaacaaagtaataataatctttggctatagaaactaaggttttaatatatcctaaaagctcgaacaaaaaaaaaaagagagaagaaaagataaacacactatgcgatggatagttgaagtagaggatatggctatattttagtgcttttcaatcaataaatttatttttatttctattttaattaaaattcaaatataaaatatagattaatttacagttacataagtatatatatatatagagtataaaataaaggaagtagcgtcatagtttgtaatattaatgtggacaaatagtaaaaggtatcaccctgggtattattatgattaagtatttattgttactttatattatattatgatgattactaatacacaacaataatgccttacataatctatttgcgggatccgaatccgccaccagaacagttgatgactaattttgcttaggtgagcaatcaaggagtaaaattttgatctcatgtctttttccgaaatttgtattccttttttttttttgtttgattttgtttgagattatatagaaggaaaaaaatcagttttatagggagaaggaaagaggggggaagggcagtaattggatatggacagtcggactttccaagggtgggaagagttagggaaaggaactctatcccaatatattccctaacatataccaaaacattaactaaacgttattgcaactgatagccgttgcagataaatttatctttagacacctgtgaaaggaaaagtaagaatacttttgttttttttatttattaggcgatttcatctattcctttctgtttagtagtatattgtggtataagtttcttcatattcaatttgtatcatattgtatctcacatatttagcacaatcttaattattgtattacaaataataataataggcctgtaatcatatttagctattttcaacccgcaaactttacgaaagaaatctaaataaataaaatggaccaggctgttagtgaaacaactactatctccagtaatactgctatagatatcaccactaatagtgcaaataataataatgacaatagcggtggtagtaataataataataccggtgaaaaccctgtgaaaaaatctttattaccgcaaagatcgactgtttcaaagggtaagtattctttaaatgattttcagattatgagaactttggggacaggttcctttggtagagtccacttggtgagatcagtccataatggtagatattatgctattaaagtattgaagaaggagcaagtggtcagaatgaagcaaattgagcataccaatgatgaaagacgtatgttgaaattagttgaacatccatttctaattagaatgtggggaacctttcaagattcaagaaatttatttatggtcatggactatattgaaggtggtgaattatttttcctactaagaaaatcacaacgatttcctaaccctgtggctaaattctatgctgctgaagtcaccctagcactggaatatttgcatttccataatattatatatagagatttaaaaccagaaaatattttattagatcgttatggtcacattaagataactgattttggattcgcaaaagaagtggaatcggtgacatggactttatgtggtacacctgattacattgccccagaagtaattgctacaaaaccctacaataaatcagtcgattggtggtctttagggatactgatctttgaaatgttggcaggttacacgcccttttatgataccactccaatgaagacatatgaaaagattctgttgggtaaagtgatatatccgccattcttccatcctgatgttgtagatttattaagtaaattgattacaagtgatttaacaagaagaataggtaatttacaaagtggatcacaggatatcaaatcacatccatggttcggtgaagttgtttgggaaaaactattgaataaagatattgagactccgtatgagcctccaatcattgctggtgtcggtgatacttcattatttgatcaatatcctgaagagagatttgattatggtattcaaacagatgatccatatgcaaaatacttcaccgaattttagagggtatcagtaaagtagaagacaggggagagaaattataacgaaaatatgaaatagtaaaatataaaaaatgtttggaatttacagatgtatatccaattttgatccctattaatttagtatctttcctcttcatttcctaatcaacataaacgtacgtatatattaatatatgtttgttatgtataaatataaccacgatgctgaactttgaaaatcaaaaaaaaaaatcttaattccgggctgcatactaaaaatcaataaaaaaaactatatttcttcttctttctgcacatatatacagttatgatgtatgatctaatagaaagaatactaatgattatataatatctatttatacatatgggtataataatattattaccagtatggttattgacaacaagaatgaaaaaaaagctagcaaaggtatattaaaccaattttcatttttcattccttcttcttctcactaacatactctaaggctgttaatctttctgctaaagttgggtgactataatgatatgcggaatataatttatcaacactcattgtagatagatttttgatttgtaaagtaatcaaagcgcgagatagatctttgctgaatccaagtttcttagcatatccatcagcttgatattcctgttttctttgtaataaagacataccaaattgaagaatgcattctaatggagtcaacaaatcattgaataagataaaaccaattaaaatagggaaaccttgggtgaataccacaaagttactatttgataatgcagtagaagcagtatcactattctttacaaagaaaccaaatgcattatatagtgactcgttacggtaaacactggtaaacaatttaaaaattgctatcatatgaatttgtgaaatgaccaacatatttaagatgtggttcatttgccaatgaccaatttcatgagctaaaactgcagtaatttctttaattgaactttggttaactaatgtatcaaataaaacaattctcttggaagtgaatggtaacccagtgaaataagcattagaatgagaagatctcttagatccatcaatcacaaaaatcttatctagagggaatccacaatccttagctagattttcaatagaaactttcaaatcaccatcctccaatggagtgaacttgttgaataaaggcataataaacactggaataaagaccattgccaaaatttggactacgagaacaaataaacatatgtaccaaaggaaattagtctcaaaatagtcgaaaattttgagaaagaaataaaggattggacctccaataatgtagcctaacaaagtacctttaatcatatcgatgatccataatttaatggtcaatttattgaaaccaaatttttcttctaagacaaaatgactgtaatatgagactggaagacttaatacagttgatagattagatagagtgaataaaaacattaaactttgagccacaacagatacagcttgatatttggcagggaaaatattttttgaaagaaatttaccaatgttccataatttaggtaacacatcatatttaacaaagatcaaattctgaataagggaaattaaatcagagacgacagagaacttaattttagtccttgaatattcttctgatttttcaaatgtctctttgtcaatctcgccttctaaaacagaaggtaactgttttttagataaaactctatactgacgataggataaataggtttcaaatacaaactgaccaattgaaattccaattacaatttttttccatggaaagtttgggtgttgaatagcttctgaaatataatccaggaaagtcatttttccaatgttagtatcagctttgatcactttttaatagtgttttcctctcaactaataatgataattattgttttactcaatcaataaatgaagtatttcaagtgtgtgagttttaaagcagtgttttcaacatgagtacagaagtagctgtgtattgccacttcatgtaaataatggactgcatcattcttttgttttactttacgagaaaaaaagccattgagctttcgtataaaaggatactttgcctatttttattttttgttttccttcaagactcgaacagacgtctttgagttttttttttaaacgagttccaagaaaaaaaaacgcttttagtgaatcctaataccacacagtaattatatatacgttgtttttgaaaataaaatctaagaacaagaaactaataacaacatggaatggttaagaggaattgaagagtatttgtgaacttttcacacaagattactgatgtcaagacgtcacactcagatctataaattgaactgtgtagtaatatttattaattcatgtaacactaaaaataataataataagaagaagaagaagtaaataaaaatttaactattaacttttcgaaattatgagtcagttttatgatccatttgaagagtacacttattattccgaaacgacacactttaatgaggctttcatccaatatcaacaagaagaaatatataaaagaaacaatccagaaaagctgcctgaactaaaccctctggcaacgggaatgggagctagaggaatagtaaggaaacgtgattcatatgatgatgactctaatagtataatgaatgtcactaaaaagaggcaatgttaatgtatgtatatatatatatatgtaacagggacattaggtagtttttaaatataaaattttatgtatatttgtacatacatgcattattattcactttaaactttgatagaaaagatttttcataccattaagtattaaaatttattattatagtatgaaataaatatatatatagatttaaaagaaattttatttataaaaagcacactgtaatttttggtttaaaaatatttacaaccttttaaataaataaaatatgacgtgtgttcgtgtgtgtgtaataattgatccacaaggcctgaaatattgtcagtatattccattaatggaaatgtgtcactaatcataccattgtattgcaagtcttccaattcgtgtggtaaagatatttttttaataaatatctctaaaccggctgccttataaaatggtggaactaatggaatgtaatcattcttatgaacgattctaaaataacctcttttcaattcaacttgcgcagcgtttaaaatatttttatggatcattttagcgtcaaataattcattaacccaatttttcaaattagaattaaatattttaggcgaagcatacgttaagacaagtggatgatagcctcttaatcgtaattcgattccaactatgcttgctagtgcagcacccaacgaatgacctgtgatcacaattttaaaagtgggatatcttttcaatatatgttcgattttaaccaaaaaatctctacctaaactttttgtaaatttagatacacctttatgaagctggcaattttgacagggtgataattttttatttttgactagtttccaatattctgtttgagatattggggaatattttgttggctggattgtaaaatcactaaaccaatcttcgctggtagttgaacttctaaacacaacaataattgtcttgttactataatctaccatgacgtatccagttcctaattctccttcgcttgcttcaaaaacagcagaaatggtggagtttcctatactgggatttaatgtatagttatgacaaaactcaatatgggcagggcaccctccatcttttaaagtaaaacctgggtttaacccataatgagtgatacaactagatagagcagatgatctaacaaaataggttaattgttgatacacactatctgaaaatttaacatcatatttctcattgaattgtttcagggtttgggagaagtcaacaacatttttgctctgtacaaatgtctgaagtaaaaataaaaatattgtcataattacataaaatgttcgatttgaatacattgaaatagttgatttattgtacatctttatatatattaatatatgaatatgttaattttatccttatacagagacagatctacatttatattatactattatgacaattgactcttttgaaatcattttgtgacatattagatttactgtcattgtcttcttgttttttatttttttttttgtaatttttaattataagagttatcaaaaatgatacaataatttagatataaactgatacagtgtataccatgaatttatgatgaaatactctgtgtttgattaaatacttctaaacatacattaataaatgtcgcaataccccataatccacacatgaatataccaactagtctaagctctctttttgacaatctgtcccaaagtttaacaccaccaattaggtttaacaataacaaattttgaatcaaaatagtaatacaacacacaacaaattgatagttaattcctgtattcgcagagctatcatttaatgattcctgaaattcaatatatcttaaaaaccaccaattagtatttcctgattgtaaccaaaacatggtaattaaaccactaagacctattccaatcatagaattcaacattacaccaccaaggcaggattgaaaagaaatcacaaaaaacttggttgctatcatttcgatatgatccttgttgggcactttcaagtataatctgcacattgctatattagttaacagatcactcaaggagttcccccaagcaaatatagttaatcctaaaatagctttggatatccctgttaatttttgatataattccattaattcaattaaagtattggcgattaaagatataaaaagaattgaattcacaataccaattaataaaaatatgatatttagcaccgtttgtaatttttctaaatttcttctttctttattttttgtctcgatatcttccacggaggtacttgttgttaataacgaaaattggttatgtaaatataattgtctttgaaaatgagctaaaagtgcaatcaatcctaaaattattagaatggttgcaatccataagataacgtgtattttcgaccatgagcataagcatgcaattaatgtcattgtcatcactggtgatattaacgattgagcccataatgtaattgatttgataacaggtagagagtagtatgtagtagattcatcaaattctaatatattaatcaaacgaggacaagataattgaagtagtaaaacaaacggagtagttaataacgacaaagtcgcgtctattttagatttttgtttaaaatttaataaatgaggagttaaaatttggcacaacaaatttcgatattttcgatttctcttcaaatagttgtgtaatgaaacagattctacatacggtaattcattcaattgatgtgcttcagtttcaaccaggtctgcaacatcatgatatgattttaaagtcattggtgcagaattcaaaccggttctttgggaattatgattagaaacattgttagaatcaatatttaaagtattcacatggtaatatattggttcggaaagggctctttgacggtcatgtggtaataaatggttgttattcgtatccaatattattgaactggaactattgaagttgatcatttcgtgttcagaattagctacatttgtggatgacaaaggtgagttttctaaaatgtttaataaattattgaaatccattgcagaaatcagatttttctttattccagttgtgaaatctacattatcgtattcaccttcaaaataagaactaatattttctaaatcaggtgttcttgcttgtaaataaaattcattatcagtagcattttcgttgaatcctatgtgatctgcattgttattactattgacattagaaaaatttgaaatatcattgccatcaaatgaattcccaacaatattactatcgctgatggtgtcactatcaatatgttttggtttggaaaaatggtgtgaaaacttggaataaatataaaaggaatatataaataacataagcaaacaattcataattgtgattttattttgtaatataatatatgtcatcaataacatggcaattaaaaccattattaaatctttaaagatactatatttttgaacagggatcatttgcaagtcaatagaagacataataattattatggttccctgtacaatacaaagtatgatcccacatgcacccaatacttcacctatcgatagtgatatcacagtcaagttatccttggttgctgaggtccaacttaaaaaatttgaaaataaatctggggaagaattacaccatgaaagtaatacagccatgataataccagaagatgcatttgaagagactttaataatactgggtgatgctgatatggctgaatgtcttgatgaggatttttgttttaactccacaatgtttgtcacgttaggacataaataatcagatgcacatatccccaaaagtacaaaagaaaggatgatatgaattaaactgaaaacaataaattgaactgaccatgatggattagcatatagtaacactgggtgtgttaattttaacacccattccatccttattcgatcataaacttcgtaataaaacaaagaaaacagttcacacacagaggaaataaaaaaagagagaaaaaatggcactatgaaatatgtaacgtgacaccgtatatatatatatatgtatatgtatatgtatatttaatatcgattcaataattgtttagttattaatatgttttttatagttaattgggctgttctgtagtcttggttaacaacgatatatatatatatatatatgtatgtataagtttagtggtttttcaatattgacaaaattgaaattatcaaaaatttaaaaataaaatgaggaatgtgaattgaaaagtgaaaatattatatagataaaaatatttcacaagatagaataggcatagatagatgtgtatgtaagttgataaaatacatgaactatttagatgtgtgaataatggatgttcttatatactatgaatttatttattgatattggaacttttcaactgggtaagatggaccaacttcttggatagataaagatgccaaccattgacccatgtcaatagcgatattaagatctttacctttgactaaaccagcaataaacccggcagcaaatgcatcaccagcaccgttagtgtctacaatttttgattgatctagtggtttaacaggatactttttagaatcatctttagtgacagcaacgattggttccaaaccatgagtgaaaatgactgtttttgttggatctgtttcaattatagatttagcaatagcttctagatcatttttatcacaggttagaccgaatgcttctgcgtaagctgcagcttctgtttcattggcaatgatatgagtagcatatggaagaacttcagttaaagcggtgttaaagaattgtgggatgaaaggagcagagaaattcaagacaaaaggtttaccactctccttggcatgtttacctaatttgatgatggcctctggagagacagttaaatggaatccacctatgtagaacaatttcgagttaatgacagcgttccagtgtttatcgatatgttcaggtttgaaatggttagcagcacctaagtcggtgaccaaagatctatcgtgaccattaattagagctgcacacttgcctgtaccaatctctgggacgacttgatacaaggatgtaacaccagctttttcattttcactcaacaatttttctgagaatttatctttacctacacagccgaaataagcaactttacctggacctaagatataagcagcacctctcgcagaattttgaccagcaccaccggcgatatacttgacgtctgggaagtctgctatttcatcgaagattttcattcttggatcagttgcagcatcttcgataaggatagcatcattggattttaagttatatttagctaaatattcaggttggacagtagcttgaacatccagtaatgggttacaaagtactaataattctggtaaagaagacatggtgagttagctatggagtcgtgagcaattgttgagtttatatttattcacttttctatgttttcaagaaccaactgcagtccacaaaaaagagatcatgattaaaaataattctctcagtaatgaagggattgaaaatgagccaacatgtgcatgaacaagcccactatggagcatacagaaagtatgagagcagtacttaacgaccttgttagaaaacatttctatttctgtagtctttgaaagaggtttattctctgttgcttgtttttgccttcgagatcctcacattttctcaagattttccaccatcgagaaacaaaaagcaaaaaacaaaagagaaaaaaaagaaaaaaaaatttaaaatttgggaaaaagcaggaaaaagaaacgacttgaaaagttttgtccgactatatgatctcaagcacccatgcacccacaattatgttcccgctatgtttccgccaattctccgatccttgtaagacaaaaaccctcccccaaaaaaaagaagacgaaaaaaaaaataaataaaataaaataaaaagagagaaaccacccattcagaatctgtgatggtgtcgttggctttgttcgagatctgtgtgtttctcaattttgcattccagttttgaagacaactgcactagtaaaaaggagtagttggttcctttctcttggataagtagtggtctaagttatttggagcagatcaatagcagcctgtggtccatattatgtgtcccgtccgcatagacacattgtgtcttgatgcgttttgttcgtttgtttgttctttctaggctcttgcctttaagtctatgtttcggtttgggcttaaacttgttatttctcttcctttgaaagactgtaattcttatgtgtttcctatcctctcttttttttcttaataatgtttcatgtctgtgaccatctctctactactaccaccaccctcatctcttcctatctttcaaccttctcattctcaacaaaaatcactctttttgaaaaacgtcaagccaattgaaactaaatacgaaagaaagaggaaaaaaaaaataataataatattctttttcttggttttgctttttctggtattgtttagtgaaatatattatactaacaataaattcgagaataataatctagtcaccttagaatacttatatatatatatatatatatgtgcgtatatatatacttatttgtttatttttggtgatattgaattacaatgaaatattaggaccacttctagcttgttttttttttgaatgtgttaaataaaaaggttgaatcgactctactagactaaccatatctttattcatcatgacaatcaccagtaataatactaccatgtctgggttaatagaagtcattcaaacagttgatcctttgttgaaatactcatggtttcctaaatctcagaactattacttattacatttacatgaaatcatttattctttcattttctatcagctcgtatccacatatttggcaccattggttaacaagattgtctttggcgaccgctacattaagatagcagatcaagaattgaagattgattttgatattcatatagtctccatggtccaggcatgtgtatcattgtatatcctttggccagtattgacattaccattaacatcctataacatcgccacgtatcaaaacgattactgttcaatggtgacttcattgtctgcaggttattttatttgggatctaatagtatgtttaagatatttcaaagtctatggttttcaatatttgatccacgccatctttgctctagccgcttccttggtcccattgttaccagtatgtcaagtctgggtccccaaatttttattatatgaagccagtacgccttttgttaacgttaactggtttatcatgcagatgttggcaccatctaaaaagtctaatttgaaacctgctaaagtaccaacctggttaaatctgattaatggagtcctattaatgattatattcttctctgtgagaatcttatggggcaacctggcacaattcgtatatttctatcagatgtataagtatagatcggacatgactacattgaaggtacagttggctgtaattttggctattatcacgcttattttgaattctctaaacgtgttttggttctctaaaatggttaagatcgctaaaaaactagcaaactcatctaatgataaagataggaaaagagagtgaatatacaaaaaaataaataaaaataaaaataaaaaaagaacagtattagctgtagaaaaattacaagattttgaggaagaatattggcaaaaagacaaatatatctatgtgcatatgtagccacaaatattaatatgtattactatttttttctatatttatgatagcacaatatcataattatgtatattttctctttttttttcattcttgaatatacacaggctggtagacatatgtattaatctaagtttgttggaaaatagtactcatcgtggtagaaagctattcaactctatttcacgttaatattcataaaagatattcctttttttggaggtgtgagtatctttttcttttacccttgttattatttctgatttcactattttttttattcacaatgcaagaaaataaaggtgaaaaaatactaaaaaaacaaaaaaaaagaaaaaataaaataatcaaaagaaaacaaacatcaacaagacagtaagggttagatttaaaagaaggagaaattttaatgcaattacatatacaatatcaataactgagtttatcaatctagataaaaaaaaaaaaaaaaaaaaaagaaatattgttgggatattgataatgtttagattaaccactacaacaaaagctcttcccattctccccttagtgaaaaccacatttccctttctctcaactactacattaatttctaatagatttcaaacgacaacaacgacaacggcagataaatctgaacccttctctgacgaagatataaatgagtggttacaaactattcgtaaagcgcgtttaaatttaagacagaacagtttagataaaagtttattattaagtgagactatcgacataaacggcgaagaggaatttactcccactgaacagcaaatccaagaatacgaagcattaaaagatgtgccattgccactacgtaaggatcctgtcttggaacatgtcactaatatgattatgcgtcatgggaagaaacaggtcgctgaaagaattatgtctagagctttacatcttgtatattgtcaaacaagaaaggatccagtggaacttttgaagaaatccttagatgaaatggcgccattaatggttgttaagacttttagtacaaaagtggctaaatctgcggtcattcctgtgccattaaaccaaagacaaagaaatagaattgcgtggaaatggattgtagagggtgctaataaacgtgtttcaagcgattttgctgtgagattaggagaagaattggtggccgtatccaaaggtattggatctgggtttgacaagagagaccaaattcataaaatggctattgcacatagagcttacatcaaattgaaataacatcattaatagatgaacaagtggaagacatttataagaatattacgttttaccttttttattaatttttactttgcgttcatacagtaccacccttacatatagataaaagtatatatttaattgtctatggatatattaaaatggctgaactgcacaacttgtacatatatatatatatatataataaaatatcttaatccataaatattcaaataaaataaaataaaacatcacagctactagaaaagctctgctgttatttgtttgtttgtttgattttgggttatttctaccatatgatctagaaaaacctgcatgtttaactatgtactgggtgcataacctcactatgaaatatctaatacgtaatgtagacaaaggtacagacgttctgtgacgtaaaactttgtttgagtgtaaattttcttgggaccgaaactcctatgagataaccgaatcgggtaatagccaaacagccggaattgagattttttgttgtttttttcctgtttttctatttctttgccgttttgggtaatccgtgcgatgactttctcgatgaattgacagtggattttgacatggcaataccttttctggttttttttttgatattggcattggtattggtatgggcaccaataagatgtgatatcagaggtacgtcaatttgttctctataaagtatgtttttttttttgaaaaattccttgttatatatcccttgtaaacctcatcttgtctgattcctttctctctctttttctcattcttttttttttatccattcttctttaactttgttttttactttatttttgcgttcttttatattgatatcatataggatgttcctataactttttagaaactgaatctagtcataatataacaatatacaggaagaaaatagcataaatcattcatggtagaggtcaagttaaaagtccctttaacgaaggaagaaaatgaggtttatagacgttatttcaaagcactagatccagatcgcacaaacgtggttactgcagatgttgcaaaaccgttcttggaacaaactggattgtctggtagacaacttggacaaatttggtctcttgtagacttagatgggaaaggttttcttatatttaaagagttttgtgctttaattagatgcatatctcatttgtcagcaacaccctctgtaccaataacttcttctctctatgatttccccgttactaaaattgttcaatttaatttaccagataataatagtaataatagacaaagacatagaaggagtgataatatcaaatcagtaccactacctttaatctctaatagtgatgtgtctaggttctcccaattatttgacaggaccacagctggacaacaattgttacctggagataaggctagagctatctttataaaagctaatttgcccacagatgtattgggtgatatttggtttttatgtgatagagaacaagatgggtttttgaataaatatgagttcataatggcgatgcatttgattggcttgagattgtcccaaaacccattaatggatcctgttcccaaaaaaatatccagaaaattatgggtatctactggtttgccaacgtctaattctactttacaatcctcccgttcgtctacccctattactactattactaccacttcttcttcttccccttcttctttgaattcttcatccgcagcacccaattctccttctaggtcctcttcccatagatctgtcacatccacctctagacgttcctcccgtcactactctccaactttatcaaataatagtagtcaaagaacagagtctccagtaattacaagaacaataagtgggtcctctatatcgtcacgtaattcaaataataatgcattcttatcacctttcaccccgttagtcagtttatctgaaaattcatgggagattcaatctaaccagtataaaagtttccaaaacactttcgctagtttagatagaaataaagcaaaagaattaggtccacatattttagttccatttttcatgaaatctggtttaactagagacactttagcaaatgtttgggatttggttgatatgaacaagactggtactttaaataaaaaagaatttattattgccatgtttttgatccaaagagttagagtgactagaacaaatttaccttataaacttccacatgaattgttggaatctgtggaaaagttggctaagaaatatgcggaatcagcaactctgtgtatggggaaagaaaccacttcaggccttggaattactttatctaatatccaaacaaactctagtattgagaagaaactgaaagaggctgaacaagaacaaacaaaaacgatgaaggagattgaaataaagaaacaaaatatttcaaaattaaaagaacaaatcgaagaagctaataaacagttggaagagattagtatcactgaaagtcagtgtaaatcacaattacataaattagaagagattgaagattccttggttagcaaattgaacggtataaatgattccatacagcagagcaccgcaagaatagcaaaaatggaacaaactatagctacaacaaaaaaaaattcagaacaattgaaaagacaattagctgttgctgaaggtaactatcatgcaatggaagcaaaattaacaattttagatgaagaagttaaggattgtgatgaacaaaacgaaaaagtgaaaaaggatatttacactatgaaatcgacgaccacaatattacaaccaaaaataaaagctaaggaagaagaggttaaagcaaaagtagaattactaaaccaatctaagaaagattttgaaatagaagaaataacagtagaaaatttacgaaaggaattggagaatttaaacaatattttcaaagaatatgaagaaaaagtggttaacaattaattatcaatacaatacactaatagaaaaggtttgatgaattttttcttgtagaaaaatgtagagtgacacgagacaagctaaattaaatactaatggatgttcctcttactagacgtaattgagttgaagtttggtttcagattagtcgaacgaatagttcaacaataaagtcagtgtggagtgctgtgtatgtgccacttgataacatttttatagaattttatttactttataaaatatagatgtaagcattattataaaatcaagataccctttatcatactataaatattgaatgtttccaggttacatatagtcttgatacaattttatacttcaaaaaggtgaccatttctatcgtccattaagataaactaaggagtgaatgttctgtttatcttcctttttttcttcatcagatgtgatttcttatactggatttttccttattcgtcattctgttttccagtttgaaaaattaaagtcccatgtcttttattgctagaattataactatagattatgttacctgttgtactctccttcttgtattagcatatcatgtaaaccctctgtcaattctttatctggagcgtctagtatcttttggccaaaaaatcgtgaataagtgtcatctatttctttaatatcttttttaacgtcggtttctaactgcattatctcctgtaaaagcccctcattaatatttctaactttctttaatctttcatctaacttttcgatggcaccttgcctctcagtatatagattacaatctagaagttcattgggggtcagttcgcttattggtctatccataatatcactatctttctctttctcatcattgctttcattatttattttatactccaatctagtattagcttctgataataactcatctaactcatctaatttctcttttacttgacggtccactaacaattcttcaaattctttatgatttaaacctatccagaattgaacaacttgtttctggcaattcattaaatgagtaatgccgtcctttgttttggagtatgtgggaaaacaagagctgaatttttcccagtcctgaaatttcaccaatgactgttttagtgccctatcaaacacctgatttaatcttaaaaaccgtattttttgtacatttgttgtttcttgaaccatgactaaaatatgatggtatatatattcatatatcgatatgtggctaactacaaggcactcacatttacttgatgttgaacctaattttacacatacaatattttttgttttacctatttgttttttttgatctaattgtttcgttcttctttttatttttgttggattgcttgatttaattatttcacatgtgatatttttggaaaagaaaaataaatagataaaaaaaaaattaaagattaaaatggcttataacgtatcaacaggaaattttttgtaaaaaacaactaactagccattttatggcatctatatagttatttgcataatctgttattgtaatagtaaaagagtactagtcacaagtcatttcacaattgttacatattaagataaaaggtatagactctaaaaaaataaaacaaaaaagaaaaaagaaaaaggaaattagagacatctgctattattataacagtaacaaagtgtaatattactattagaggaataaatattgtatattattataatatctattgtgttttataaattataaatgaattcttcaggaaaaatcaccagtttattgaatcaacaaagacttttacaattgtatcaattccatcctaaactaaaaaacatttggtacttagttgcagctgccacattaagtgttgctaattaccctcaagaaattcctaaagtataccattatgctatgcaattaactgccaaggatgctgataagtattatgttacgctagcacacagaacaatagaattgttaaactactatgatccagcacaaaggagacaagctattgaaaaagaatatgaattcccaacagaacagcaagctatggttaccaaaaaattaagagaagcgttattaaagacggggcctctagccgggttacctagagctattaatggattacatgccttaaaagaatataccccttcaaagctacgttctaaatctactcagattgatgcgtgggaagcggctgtaagagatgaaataccgtgtcctgatacattaaggaaaatggtggggaataaaaaggatcaagtaaatatcgtccacagaggtcttcaacaatggaattacatctataataaagtctctaatagagtggtgaataatttgcattcttcctatcctgatttatggtattatacattagttcattgttatggacctttattttcttatgataaaatcctctcatcaccagaaacaagtatggttgtcattgcatctttggttcctcaagatgtcaatcctcaattaaagggtcatttaagaggtgcactcaacgttgggtgtgattatgaaagtgttgaagctgtaagaaccttggcaattttagtatctgaatggtgtggaattaaatggacagatggtgttgtaaaattaaaacctaaaaaattgctcataaatactaaataatataagagaatcaacttcgctttctttaacatcatagaagttggtttttgcatagagtttatttatgcattacagtgtttttttaattgaagagtttcgcatactcccaattacacatccagatatattatatactttatattcgacaatttttcggcattattttattagtttatacttttgaaaagaaaaaataggtatgttcttctgctccacaaaataactattttctacctaatatattaaaagatgataataaatcctttgtctgatttaaaaaattataattggtattaagtttgtctttttcatcttgtataatgtctcttgaagaacctttatccaatttccacttcttaaaggtaccatctagaacgatattcatttcattatcttttcttccatacaactgccaccaccatttaactttgttcaagtcgggctggatccaatcttctatttcattggaattagctttagtacttccagcttttggtgttgttataggaatataagaggtatttaagaagtcttctctttttgatttaaaataatcccatacactttttgtttgatttcttgcattatatttttccatctcttgctcgcaatcaaataaaaatgttccatactggcaagaatataaatggtaaactaatcttcttaggaacctttcgttgaattcaaaactttttggattttgatttagtaattgataaacacaatcaaggaattgttgaaatattggggatgtgaacttaagtgttctcttttgaatggttttttgaaagtttgtggtccagtgattagtaactgtattttgaacccctgatattttttgacctgaagatgaaatagcagaaaaactgttagaaattgtgttaccaaaactaggactcatatcattgttattttcacaatacgctggaccttttaaaaatgaattaaagttctcggaataataactggttttttcttttccaaacaagagatcagttgtatgatttgtgatagtggtcttgaaatctactgtattatcatgaaatacttctgtagaacttaaatgaccggatctttccatgaatttatgtccaaatgagatccaatctttttctatcaaaaccataaacccttcaagagttctaaaatagggatctaaacataattgtattagagaacacacctgcggtgtcctgtcccacccatcagaacagtgtattaaaaggttctcactattaaaaatcatagcttttgtaagtttatcaacactggctagtattaatttaactgatttcatccaatgatgtgcttttttgtgaatcatggatggcgataaatccttattcacatcagtatcagttaaaaatgattcggtaaaagtggtcattgtatcggacattacatgaatattatctatccctaaaaatattctttcacagttataactgtctttggactcggtaccacctccaagggcagtctgtgcaatagcattcgtcattggccttgcatctacaataagtccacgtttttgcaaaatcggtgtagatttatgttcttcggagccattactgcaacactgaaacaatgtttttaccaatgtttcatcttgtaatgatctctgtttagttatgccaggcaatggctggctacatcgactaatagaactatttgtttttttatagaaataacataaagctggaattctattctttgatctatatttacttgcataactcaatatggtatcagacaccattttgggaaccacaattttgttagggtaactgggacaaaatttataatcttgatttatattggaaattctccaaggacacgaatcaaaatcaaatctaattccttgtcttttgaattcagattcagggccatatatctcccaactattaaatttcatctctttatcatttggttgatatatgaatgcatataagtttgtcacatttggtaagacagtcaatctcattaaagtatcaaaaacgtcatttacatcattctggttaacaaaatctagagaaaagatcgtataatcttttccaataattttgacatttgacattgaccaaatatttctatttgaataccatttcaaagtttctaaaagtggggtgtttgtggtttttttcttgtcactataattcttatctttatcttttgttactgataaggaggatgtgggtattttatcattatatttagataacaaagcacttcccctatttttaaaggtagcactaatcatggggtatggaaaccaaaactcatttgataccaaatcagatgtaaagattaaatggtgggttgtcaaatggagtgccccctttagaggattaccctttctatgtaagaggacattgtcaaccttggcaatcttaatatactccatgatgaaatcagaagtaaaggaaattttggttaaaaagaagacaaattaaaagaactatatgacagacatgaagtgtgatagatttatataggttgtaaattagtggctctatgataattagttggtttcatccataatccctattctttagtgtactttctttttgacttttagtatttttatctattctcaaaatgtttgaaatatagaaaaaatagtttacctcattgtaaaaaaaagataatatcacaaaattgtttctatctaatagttactgttattaaaagaggaatatagattgttgctaaaaagaactgtaacatgtatatattaaggtacataaaatagtaggtctgttatatgatattcagttggtctaattatgttactatagtaacagtttgtgattctaatacgtacattccttctttaaatctttgatcatttctttgagcctttaaatatttccagccaacaatacttttacataaatgacaaagaatcgtagatataagatactgtccagttatcatatgtttaacgacactagacttttcaacaatattgataataccagacattaaaaaagcaatacctgtagagcttctgaaatctttagatatgatgttcaaggatgtagctagatgtgttttgcatgttttacagccaaatgtgacaacatcatgattctttcttatgtttgacgaaattaagtataaaatgcttgaaacttcagatatatggcactttccatcctgtcttaaaaaaggttggtaagaggggctattaatattttgttttagatcagttattaagtttatttcatggtataatttatttatataatgggggttgcttgattggaggggggtaatatcatcattttccatttcacaaatttttttacctttagttaaagatacggtttcttcgttgaaatattcgatataataagataattttatgcccattgtatatctttctttacaaaaaataaaaaaaaccaaaaaaagaaaacaactattggcaaagaaatataaacttacagaggttgttgtgattaggcttgtctatttgaacaaatctttactattagaatccaaatatttttacattctcagtgtttcttcaactaaaatcatacatgataaaaagaaacaggaaaagaatatataatacaacacaaacgaaaaaggacaatatatgtataagagataaatataaaaaaagtgtgtaacctaataattttactataaatatgacataattactatacatatatatatatatatatatagggatatgcaattgcacataagggatggagatacaagacttttgattaggaaaaataatgcaatgtcttcaggctttacatgtaaattctacagatgccttatagttcaatattaataatatggcactaaaaagattaaataaaaaaagaaaatacaaatactctatatattaggtacagataaagaatcttaaaataaaaaatttcagactacttaactcattaattattaccctttttaaatatgtatagtagcataaataaaatatatatgagtgtgtatattatcctcacatatccaacctacctttacgttaactttatttttttgtgatgctccccgttttatcatattacaggcttcataccaatttatatttgtttgccctttgtttggattaccctcaaataaacctgtgagtattttatcttctgtcacgaaagcagttttttatggtaactttatttttgtctattgtttgttcttctttttctttctttattattttgacaccggatatatatttcctttcttttgttttcggaaaagaacaaaaaacatgatatctcgccagcagttgcacttaacggtgccgtacaaacattggtaatagatattgcctattgtcttttttgagtattgttttcttgaaaaatttttctctctagcagttgcacttaacggccatattttctaagatatagagggaaattctctaactgttgcacttaacggtaaactaaacaccaaaaaataagtaagcttaccaggaagttcagaacacaagagagttaaccaagaccatacatactaaagatgtgtctcatagtatataagttctataaaaaagtttattttttctgaaaaatattttggtcgttttgttccaatttcaagagtatacttgttagcaaatattttactatggccagatacctaagggaagcacgccctcctaaaaacagcagtttccttcaatatattgaatcaataaaatcatctaaacaaactagttctcaatacactcggatgtacggatgtatcgtgaatcattcaaaacacaaaaaacgatccaaacaaaagagtttcttttttgttttgtttttgtgtttttccctctttcttgctgtgtgatactctcgataagtattttttttttcccattgtcttcagttcctgtcgctcgaacgtttttcaattttgtttgtgttcttcatagggtggctattgtgggaaacattgtaacttgtttgaaacctaaaggaagggcatcgagtgtgatctttgtatttatttacttttccctgtttgatatgtcttccataaaaattagctgttctctcctttgactcatttaatattttagtatctatgttttaatgcttttgtctttggtgatgtcatgactcttccaatactcaatactgtcacattttctcctcctcatttcttgctgtatatataaatactatggcttagaaatactaaaacacataacattctcgatataggactatctttcttttcaaaaaaaaaaaaagaattttaaaatatctttctttattatttatcacccacctatcctacttcttttgtgtctaaatagactaaactgttttagctaataccaagtgttcaataacttacgtcttccttttttctttttcttttttctttttttttatttttgctcctctttattacatatacgacagcaatgacttctatatataaatctaccactcccacaatttcaacttttaataaccgtgatacatatgccccagaactaatcgatgatgtcaaaagtgtattaattattggatctggagggctttcgatcggtcaagcaggtgaattcgactattccggctcacaagctattaaagctttaaaggaagctaataaaactaccatactaatcaatccaaatatcgctactaatcaaacctcccattctttagctgataaaatatattatttacccgttacaccagaatatataacatatataattgaacgtgaaagacctgacggaatcctattgacctttggtggtcaaactgggttaaactgtggtgtcaaattagatcaagacggtattttaaagaagtataatgttaaagtcctaggtacaccaattaaaaccttagttacatcagaagatagagacctttttgcacaagctttaaaagaaatcaacatcccaattgctgaatccattgcttgtgagactgttgatgaagcattacaagctgcagaatccgttaaatatcctgtcattgtcagatctgcttatgccctaggtgggttaggttctggttttgcaaataatgcagatgaaatgaaacaacttgcgtcacaatcattatcgttagccccacaaatcttagtggaaaaatctcttaaaggttggaaggaagttgagtacgaagtcgttagggatagagtaggaaactgtattactgtctgcaacatggaaaattttgatccattaggtgttcataccggtgattctattgtttttgctccttcacagactttatccgatgaagaatatcatatgttaagatctgctgcaatcaagattatcagacatctgggtgttatcggtgaatgtaacgtccaatacgctttacaacctgatggtttagattatagggttatcgaggttaacgctcgtttgtctcgttcttctgcattagcctcaaaggctacaggttatccgttagcctatactgctgctaagattgccttgggttacaccctaccagaactaccaaatccaattactaagacaactgtggccaattttgagccatctctagattatattgttgcaaaggttccaaaatgggatttatccaagttccagtacgttgatagatccattggttcctccatgaaatctgttggggaagttatggcaattggtagaaattatgaagaagcattccaaaaagctttaagacaaactgatccaactgttttaggtttccaaggttcgaatgaatttggggctaacttagacaaagccttagctgaaccaaccgatagaagagtatttgccatcggtcaagcacttctgcatgaaggctactctgtggaaagagtacatgaattaagtaaaatagataaatggttccttttcaagtgtatgaatatcgtaaatatgtacaaggaattacaggcagtcaacgatttacaacaattagataaaagtttattgattagagccaaaaaattaggtttctcagataaacaaattgcatattgtattgattcaaattataaatacagtgaatttgatgtgagagcattgagaaaatcaatgaatattgttccatttgttaaaagaattgacactttagcagctgaattccctgcttctaccaattatttatacaccacatacaatgctgttaagagcgatgttgactttaatgaccatggtatgttagttcttggttctggtgtttaccgtatcggttcctcagtcgaatttgactggtgtgccgtcaacacagcaaaagctttaagaaatgcaggtaagaaaacaattatgattaattacaatccagaaactgtctccaccgatttcgacgaagttgatagactatattttgaagaattatcctacgaaagagttatggatatatatgaattggaaaatagtgaaggttgtatcatttcagttggtggtcaattgccacaaaacattgctttacctctattgaataacggttgtaagattttaggtactagtccagttgacattgatagagcagaaaatagacacaaattctccacaattctagattccattaatatcagtcaaccagaatggaaagaattaacctctgttgaagaggcaaaagagtttgcaaaccgtgttaaatacccagtattaatcagaccatcatatgtcctatctggtgctgccatgagtgttgttacagatgaatctgaattagaagctaaactgactttagcctccgatgtctctcaggaacatccagttgttatgtctaaatttattcaaggtgcacaagaaattgatgttgacgcagttgcttaccaaggtaaggtattagttcatgccatttcagaacatattgagaatgctggtgtccattctggtgatgcctctttagttttaccaccacaacatctatctgataaagttaaattagaattgaagagtattgctgacagggttgctaaagcatggaacattactggtccattcaacatgcaaattattaaagatggtgacaaaccattgaaggttattgaatgtaacattagagcttcaagatcattcccatttgtatctaaagttcttggtgtaaactttattgatgttgccgttagagcttttcttggtggtgaatatgttctagaacctgttgatttgatgatggataagaaatatgactatgtagccacaaaggttcctcaattttcatttacaagattagctggtgccgatccattccttggtgtagagatggcgtctactggtgaagttgcctcctttggtagagatgaaatcgagagttactggactgctattcagagcacaatgaattttcaagttccacttccaccttgcggcatcttgtttggtggtgacttaactaaagaagctttaggcactattgccaaattgattgccccattagactataaattatatgttaccacggaagaggccaagcaatacttaaagaaatatatcgggtcgaattatgagattaagataatcgaattcccaaagaacgataagagaaaattgcgtacattattccaagagtatgatattaagacggtattcaacttagcatcaaaaagagcagaaagcacagatgatttagattatcaaatgagaagaaacgcaattgatttcgccattccattattcaatgagccaaagactgctatcttgtttgctaaggctgtgaatacacatattaaagacaaattagcagctttgaattctgacaaaattataattccaaacgaagttcatacctgggaggaatatgttggtcatagaaccaactaataatttagaggggaattatgggaattgtgtaattactactactattattattatagttagagggaggtactcagcaaaaagacttcttaaatatcttttatgaaacttacattataggtgtaatacaaatcttcaccgtatattatgtattatatatcaacgctatagatttagtgtgtaaaacaataataaaaatccatataataacaaatattttgatcaaggagattttaaatgttcctgttttgagacattactcagacctaataaacattttgtgaaagtttttttctgcaaattagcttttagataattataaaagtggtcaagatataaaaactacaaataatttcttttacccaacactttatatacacgacatatggtcttggatatcaaatttgtatcatctaatacagtgagtgatttcttataaaatagcggttcataatgttccgttataacatataacttattattccccacctttaaaatttctatatcttaaaataaagtaatgtatataaattttttttgtaatcacattagttagaaataagcctttgcataaaataatcacctcatattttaagtggtccaggaattctcatgcaagaactcttccaaaacactatgaaatcaacaatagcaatacaaagatcaaaatgctaacgttgtctcacaatattaagataataagcacccttataatacaccagcatgtagtctgctgatagtattactgaatcttttttttttattattattttttaggatatgagtgtgtgattagtcataggaaaataataataatatcccttattcatcgtttaccaaaatattaagtaacccataacaaaacagaagaaaaacacaataacatagaaaaaccatggaacattcttttctttttttacccctactataaaaaagtgttaataacaataaaaagggataataatttttccgcaaaatattttcatattctatattcggagttttactttttcttctttattattttttttttgtttttttttttatttttgtttgccaaaaaatcttattcgtttaaaaaaaaaaaaagaaaacataaaaaaggaggagaaagacaataaataaaagtaaataatgtaaaagcggaagggataaaaaaaaaaattagtttttatctaaaataataactgtattgtttaacataatggtgttaaattgtagcctgcattaattttgtgttacataatctaaatgaaaaaacttctatttctttcttttttttttctttagtctagatatatcaccatgtatttctgaatgaatgtaccaaaatactccaccccagattaaggtgaagtggaaaagagcagtattcggaaaatatttagaaacaaaaaactaaacagtaaaaaaaaacagacgcacgtataataccgacatttgaaactttgggctaaaaacaagattctaggtttctttgatttgattatcatgattatttgacattagggtttataaaaagatatcttaaaaccatctatacacacatatcttatacataaatcagaaaaaaaaagtctatttagataactcaatattaacttaccttctttatgtactcgattttctataaatctaattgtattcttttacatttgtaatacaaagataacaaagatatgcatgtgagtgaaaaaaaaggataattagtgcttaatttcttattgcatatcgttgtatatttagtgttgtttgagcgataatctgtatatgacgttacttttattaaattaataattttagggtccagtttaaaaaaaagatagatttagattaattctcaataagatcatagtgcattttcaaaaaaaagtattaccatttccaatgtaatttcctaactctgatcgctggattccttttatttaatttgcttttttctatttttttcatttttattttcatgataaaatttatttcctgtgtaaaatagttcaatgatatgtactttaataatatatggtaacataaattttttttaattaataactatttataaaatatctttaacatgtagaaaatattttaaaccttctcctaattactccaatataaaaaataaaactaaaagtattattcttctattgcttttacaatttctatctatttcgatttgcatgtgttttaaacacaagaaatattgtaaaaacaaaaaaaaaaaaaaaaaaaaaacagaagataacaacaacaacagggatttctgatgttccaatgagatatacttaaacctcatgtttattactatacaagtattccttaatttgatataaatacagttatatatcactaatctaaattttagtaaacttaataaggcatgctaatacacttcagggctttagcatcatgaattcagtttaacgaactattcttgatcttaattttctagtaagtcattaacaaccttccgtggaaatagtttaagtagggttcattctgtgtctagaatagtaacacttttaattttttctttttgtcctaatattagtataggtctgttggtgaaaaaaaaaaaaaaaaaaaacaaaatcaaaaataagaaggactctaagcgaattatgtctaaaaaaaaaaaaaagaaaagaaatacaatttttaggagagattatgatctctactctttttttttttgcattgatacattttattgttttcgcttttaaagtttttttaagtttaattttctagaaacatacaattgaatttaccccgattttttgatactttctattgtatggcacgatatttccttcgaattttatacattaaactggggtttttattgttcttttttttgtccgaaaatatatccagttttctttttattataacaaaaaagaaattttcttttttgttttagtttattttctaattttaatatacaagtgtgagttactaattaaactcagtctaaaatgaagagaaaagatatttaagcagaaaagaatttcttttaattttatcactcttaaaacctctcgacaaagagccaaataaatctttggctatcaagcgggttttaataaaatttttacctctattcttgtaaacctcgattataatatgtttagcttttcttcgattaagcgtatttctttcaactaaaagcattaacaataaataacaagttttactcaagggaaagagataaagccttttctttttttttttttattttttttctttttgtaatcaaagtctttctcccttgctcatactatatcctccataaagccttaacaaacacaaatactaaaatattcattttaaaaagcacacaaacagacaatttttttttgcataaatgaccccatatccatttcagctattacaagaacattataaattggcaagtctagctaaagaaaagttaaaccaatgcatatcacacagaactacaagtgggagaaaaagtgaatacaatttgagagaagtcgtcggccacgcaaatttattagatagggtcctaattaacatcgataagattaaatacaactatctacaagagcaggaaaggaagttccgcaaaagagcaaaggatcactattatgattcattgtattatgataattatttgcataaatataataacatgaatatttttaatgatcggttagatgttagcaattgtggttgtattacagctgctagtagagacgatgaatatgattacgacaatgttgatgacggtgttgacaacaacattcgattagtaaaagggaatagtgaagatgttgatgatggggaagaagaggattttatttttgcattttctgacactttccctgtttctcccataaaggacccaagtcttacaatgccagagaatggttattataagtcatattgtaattattacaatgaaaaagttgcaaatattggtaatgatctggatcataacaatattaatttgcatccaatgtacttagattctatacaatctcctttgttgtcacaacatatgagctttcctacagtacactatcataaatatgtttaacagtcattagaccaaaagaaaaaaataaaggtaaatatacatagacaaatatatttatccttcatactatataaatttactaatgcatattattatatattcttctatattcattcttattgatagatgtaaaatattgtgttatggatagtctggagaatacctgaagtgaaataattcaaatgcactaatacaaacatatggggtggtaaaagtaaaaaagaaaataatgatttattttcaaaaattgtggttcctgatctgcttactaattggtaattttaaccctcccctttactgctttgtgttttttccgtccccttctttgtatcatggaatgcacactatttttgtagaaaaaaagaagggtctagccatggaaaagaaagagacgagcaattagtaagcaaaaaaattttgtaaaaacaattcggaaattattccgtgcagataattgaggcgggaatactcaaagccgaaaaagatagagtcaaggaaataaggaatctctttatattattgttgttatagcactggcacaaaacaacttactcgatatgtgctcatcaaatagtgtagttgatatcaaaaatggataatgttggtaataattaacaaccagcaccaccactaagtggtgggcaaaaataaagtagtcgtcctgatgattagtagatgagtttgatattctattgctttttcccccttttcacattcgctgttttcttctctttttttttttttttactgtacggaaagattgctgttactttattcttttttctttttctctttcttttttcttcttctcctcccctttcccaccttctgtttgataggagcaaataatgtagtggattatatttgtatataaaaggatacactgtcttttgtcaattctatcatgacgaaagacggcttgattcctctttgacagtttcattgctctttacttgtttctccaaaagttttttgtagtagccatacaacatcaagatagatagttgatatattatttatctgtatccaaacaaacatatataaacaaacatatatataaacacacgcctacatacagaatggtcaaagctgttgcgattttaaagggtgctaaggtctccggtattgtcaagttcgaacaaactgctgaaaacgaaccaactaccatctcttacgaaatcaccggccatgatccaaatgctttaaggggtttccacatccatgaatggggtgacttaaccaatggttgtaccacagctggcccacactataatccattcaaacaaacccacggtagtccaactgctaaagttagacacgttggtgatatgggtaacatccaaactgatgccaacggtactgccaaaggtactttgactgacaatttgatcaagttgatgggtccaactagtgtcattggtagagctgttgtcgtacataatggtcaagatgacttgggtaaaggcggtgacgaagaatctctaaagactggtaatgctggtgcaagagctgcctgtggtgttattggtttggctcaaggttaaacaaatcaagaaataacaataataataatacgatattattgttattatgaaaatcaaagaaagaaaaaaaaaacaggataactgggatatgattattgtaatgacgacttatttttgttcatatttctctttatatttcatagattcgtaactatatagacaaatcaaagaatatatatccatataatatttttttcttatctcttttattaaagaaatcttaaatttatttattgactgtttaaaaagtcatattctattgactattaataaagttctaatcacatacaaaactttttatctataaacaattgtactatatgtatatcaggtataaaaagtgtttgaaagtagatcatgcgaatattaaaaagataaaaaaaaatattacataaggaagattgaagagatttaaaaaagaaaagatggactattaaaatttactggaaacaataatcatactattatacaaagaatcgatcctcctggaccagaaaaaaaccacttacctttacaacgatataccaacacaaatacacacacacacatatatatatatatatatatatcgggatatttaatttctatatatctggtacaaatgtcttcatcacagcttgatttgcctccaatttatcaatttcctccattatttacaagacaaccaaataaaacaataaggaataaacaaatagagacgtggattaacataatattgaccaattgtgaacgttgtaaaatatgggtgatgagtaaaaatggtgatatgaaattgattaataaagatacagaattaatcgaaaccataaatattttccaaaattcaaagattaatagatcttgttcacaaatttttgttaacgaaattttattaactatgaaaagacagaaccaaatattaaacaaagatggcaaaccaccaacgatattgaatacgaatactacagttgaaaatgatgatacagtttatgatgatgactttttcataatgtggaaatccttagaccaatgggcaaacgaaattttatattggtttgaaagaaccacacaattaaataaagttgtaacattttatgaaattgtgtcaaatgaagaaaattcagaagaatcattttattcgatgcctgaatctttactttatcaagttttgaaaatattagtcaaaagaggtagagccacaatgttaaaagatgactcaaagtatgtggctatcaaagttgtataagtaagagaaatgagatggtcacattaatccgcatgaaatgtaatatttacagaaatatataaagaatgttttcttatttatttatttatttacactaatatgaaagcaatccttctttcttccttttctttattcttttggttaaaagacagaattcagttgtataaccttttattaataacattccaattcaaattatttagaacattatgcaaatattttttcctacctgcaactccataatcttccaaatatgcaaaatcccatacattaatcataataataggtaacgtccagtcttgtattttcccatttttattattactaaccatttctctaattttttgcagataactaaactcatcaatattaatagcactattcatatcaatcaattggtttcttggaaaataatacggagttccattattttgtaaatacaatgcctgtaattgtttctgtgcattctccacaagacaaaaccaaccttgacctaataactttgtgtttatatcagcaattatattatctttcaagtcatcccattttttaccaaatgacatttcaattctacttaaaaaaatatctgatggtcgattttctactttttgactattagaacctttatccacgggtaaaatattttcaataaataaatgattattatgcgtggctgaagctaaattgaaaatgttagtttgaaatggctttttagcagtgtttaaaatgatgtgaaatgggtaataagactccaacgaggttccagcagtagccatagttaattggtcacatagataggcttgatattgattccatactgtattgaaccctttagaactcaaaattggaggaataccttgttttgacaatgaattaatatttggcaattttggaacagtatggatggaccttctaattatggtggattttagcatacttttcttgaacatgtataagagaagttaagggggaaaggagagatgagtgaacaagtaaaaaaaaaagttagagcttcttttctttttttctttcaaaaaatacagaaagtgtgtggaataattgctgatcaaatattgataatctatttaccacctatatttgtgcaaaggtgtaaaattaaaaagaatattattatgtatagtactaacaatttactttctgtttttactatccccaattttcaataacaatatttgattaagttttaatggtcttttcgtttttctctcgtcctcttttttttttctttttttcccctatttgtgaggtttatgtattcctccatcccatcctgctaaaaggaaaacgattctgacattgttgagagagacaaaacaaaagcaaaaagctaatagattagagtggtcgattgactaatgaaggaaggttaagaggcagaggaacgagaagaagagtgcaattacaatacttatattacagtgaatatactttagatacggatgttcatagggaatagtaggagaattatttgttatatgttacctacataaagaagcacaattggttatctttttctcttaatttttttttattttgtgacaaggtcttcaattcttacatgatattatttcacagaacatgaagataccaaattaatatgcactaatctgtataatactattgtgtttcatacatgtggcatttagatatgatgttatttcaaaatagtatggtttcttctaaattattgttaaaagtctatgttttaccatatcatgtttttggaaactcttacaaaatatacaataaactatttacaacataattagatagaatagtttcagccattttataacacgcttgtgatacagttactctgatggcaccgtagacgaatttgcctactctttagtcgataacgacgatctcggttttttttttgcttacaaacattgtatttatctatgtatctgtgtatcttagcttatttctggtttacaatagattttacatatcgtttctattcaacaactaagcatcagccatcttattttaaatgaagattagggtttatcatttactacgaattttcagattatgaaaagtaaaaatgagagctgagggattcgaacccacgcatccgaagataccagaatgtttacgcttaactgcctaaatctggcgccttaaaccactcggccaaactcccactgcttgctatcatttgttgtggaatagaatagttataaccatcaagattacataagatcctgaatgaatctagaaccaattagtgtattaataagccatacatgtgctacaacattagatgctgcataataaaaagattggattacataagatcttggcaaatctagaatttacctattgttttattaagtcccacgtgtattactaatcaccatgattagagaattgggatgcagttctaatccagtagtgcacctaaattaatataataaattttagggtttgaatcagtcaagtcattaatgtagtaatctgaataatcgatcgagctccagaaaacatataaaaggacaacgttttcaggagataaaaaatcatcttccatgaccgttttttgtaaataatctatatattatatatgaacaaaaagagaacaacaagcaagtaacaagtcaagtaacttcgaataagtacattagctcgatataagccgcttaatatataagaccgttttagtaattatactatcgactatagttgattactgtctcgattatttgaattactattaatattatttgcgcttccccggaatacacaaagaacttcaccacaccatactacaacatcatttgttctagaatagagtagttattaccatcaagattacacaagatcctgaatgaatctaaaactatttattgtcttaataagccatacacgtgctacaacattagatgctgcataataaagagattagattacataagattttggcaaatctagaatttacctattgtttttgtcggaacttggagccttctgcgtccatgataatgatagacatcattaagttatagatacttgtttttgtttttgtattaaatacctgtacatatttattatatagtgtattcagtatacattcttttatttactttaagttttcttttatttactttaagttttcttttaaagtttttcatttcttttcaaatcttcgaaagacatatttggtgacaattaaaatgttttcctgatattatgtacatccgtacaccacataatatatagaaaaaccaattaaaaataattcttatgaaaatgacagtaataaactctcattttccaacagtttcattattgcttgaatatctatttattacctattatacattttatataaatgagttgtcacgaactcatatcaattaattaacctgatacattaaaaagtgacacttacatcatagtcaaaaattagcataattcaatagagcctcatggaatattttaggcaataaattacggtgacaacttaagtgatacagtaataatagttgttcctaaacctagagaaaaagttccataatcttacgggtggtacttttttatacaataacgttattataatttgagctttggaagaaaaacagaacaattactttaaatatggaaacaatagtgttgtgatataaacatattataaaaagatgttatatatgggaaagttaaaatgattaatgttttttttttcttatataataaaattacatataactataagtcagacaaaaatacaattttagattcaaagatattcattttttatgtataaaatcctgaattgatcatcttcttaattagaattggcaatatttactatttttgcttacaattttcttttttaattaattcaatttttgatttttcttgtatgtgcattaataatttatgtacttaaatataccagtattttattaatttaagcaatcagcagacaaaactttggacctacgctgtaattgtattcggataatagctagattaacatcagtctcaaattaccaagaaatttatttaaaaatcctttaatcattcagagtaaatatttcagaaattaatttactcttttgaattcttaattactataatgtaacttagtttgtgttttcaagccctttaggagatatgggaaatctaacaaaaaaactgacacaatatcatttagtgtattaataattaaaacagaatttatacggtaggcttaaaattttttatttgtaacaaaagaataatcgagtaccctggggctacctgtaccatataattcgtatgtttcttttggccatagagaaagaatagaaacagtgcacaaaatatccaatccagcaacattggccgtagctcacatttaattaaggattagtgaatgcaagtgaaaaactgaaattaaaatacaaagatataaattctaatttagtaatatatattagttttcaaataaagatgtttagatactgagcagtagaaacaataggatcctttaaaattacatcagtatacattactgagtttgacatggtcatgtctcaaaatttacagatagttactttcaatttctagtcgtatgtcttttatttaaatatattgtatatctaaaatatatcttgatttactctgacattattccatgttatatatataatagacaagataagagaatacaagaacatttgtttatataacgccaaaatacataaattgttatacgtaggagaaaaaaacagagtaagttgtaatatctattctgtattattactcttttattgacgttatatttactttgtaataattattgcatatgccactggttacaacattgtaaatgttgagaatgagcgcctttattcattggatatatagtaaacattctcaatattatattaaacagatttagtatacaaaattataataaagttcttcactttctttctttatatacaacatagaaataataatatagaaagattgtaaataagataaaaataatgtatgaagaaatccttggctttatatatgttaatattcagccattttcctctacgaacagtaagatatttaataaataaactcaacaacttttggtgacctctcaacaattattactcaacaatttatcgtttagtgtctgctaaaatcttattgttctatctattttatcataaaacattctatttcaacataccacccatagatcaattcaattttagtagatccaattctcagttagcttggcaaaaattttaacactcaaaggttttgtaagaatatcagcaacgttttgacttgtgttaatataattcactgatatattatcattttcaatttcttcagcaatgcgtaaaaccttagtaccataaaatttattcttgatttttgatatgtctcttactttgatttgatggagactagtttgactgtcagttaatattgaacacctgacctccttgtctgatatagcctgaattagaacatttaaatttcttaatcttggaattgcttcacaaattgaataaatttcactttcggtagaagaggtgcatgtaattgttgacttagatgacctagcaccaatcaaatttccatttagataatacatatttccaaattgtgatttcatatcgtgttgatttgcaaaagcagcatcagttacagcagttaaatagttaatgttggagttggacgtcttgtgccatatgagccgtttgttccttgttgaccaaataaactgaattagttgtttggttagactcatgacttgttttgatggatatagagtatgtctagctagcgtgttgacataatataatatatcatatctgtacttgtaaccgacatatgaagctaaaccgattgctttttgtagccatttcaccttattcttgtactcctgctcagtcggataaaattccctttctcttataatttcattaggtgttcctgggacttttctacttttgttaaggtctacacgtagattcggtagtttttcttctaaagatttagccatacccattttcatggataatcctttaatatattctatttccagaccgagaacatcatattgattaatcttttgagcaccgtcattgacaactttggtttcgaactgtgattggagttgagaaataaggtcatttattagttgacgattattagttaataataccatatcatcgacaaaaagacataatatcacgattgaatcattgatttttttataaaatacacaaggccatcctggtacaaaattcatatgacaactattaataataaaattggttatcttcttataccagtttgcaccagactgtttcaaaccgtaaagtgatttctttagtctatgtactgtatttcgtaatcctaaatggggtggagaacgaatgtacagttcttcttccaatggagcatacaagtaagcagatgatatatctaattgtataatatcatagttgttttgtaaagctattgatagacaggacattagagcgtaatggtgaacagtgtttgacatcagatctggttgataagtcgaagctttttgttggtctcccctagcaactaacctgcatttgtgatgaccatctcgcttgacactaaaaataaacatagagttaataattttggatttgtctacttctgtagcttcaatagtttttaccgaccaggtacccattttcgtcagctgagatatctctttatcatatgcttcttggaatttttctttttcaattggatccctattgtgtgtgattgcttgaaaatattgtaatggaccatgctggttgttctcttcactgctgacctggtttatggtgtggcgtgtagcagcaatgtaatttactgcatatgtttttgtagttttcctacgtttaccaatacgtgccttagttctttcgtccctgtctcgcttctgccgttctttggcatcgacaggttcaggcgtttctacattggtgttcttttgacgattaccagatcttgtaccacccaaggtactattgtcaacgtagaaattatcagtaggaatgggggtgagttttgatgaacgattactagatggtggtgtagatgaagatgtagatgaagatgtagtatcagtagagacagcagtgggcagtggtgatgattcatcagaagtaggatgagatgaaggttcaacaagagttaagggtagttgattaggatcattgatgtcgatgggagtgattagttcctctaaatcagaagaggtgggatgagtagtgtggttgttagatggatttgaattggaagtagtattggtggtgatattcaaatcagcatcagcatcattttgaattaaaattttatctttaaagagtggatctttgttaacgagggaagatgatttgggtgatgaggatagagtagataaaactgtatctttatgattatcagaaggtgtggcttcaatttcgtcctttgaagatgtagtatgttcaaattttgatataaaagttgtgatgagatcgtcgaatatagaatcatcatattcttcattttcatgaatatcaacgtcatgtttaattggaacaaaattggatgaggataccaccctacgtttagttgggaggtaaaataaatagccataagattcagcatctggtattagagcaaaacctttttcacctctgacatgtaatttggaggcagttttattgaggttaataatgaccggttgaccgaatggtagcagtgacttggtatcaagtcctagtaaaccgactttagaccgaggtgaatccctcatagaattgttatatatggaattacggattatagttgcatattgcacagcgtaataccataggtggtgtgggagttttgcactattcataatagtacgacaatcatttaataatgttaaatttaatcgttccgcaacaccgtgagcttgggaatcacctgcgtcggtataaacaatttgaataccgttttcagaaagaaacgtttttactgcagagttggtgtactctgttccccggtcaaactggaattttaatatgggggttttgaattgtcgctcaatagtcgcaataaaggacttgaggacatgtaggatcgttgcatcatctttcctttttagtaaataagtccacttaaacttagatgcctcatcagtgaacgatataaaccattcaggttttgtagccacagttactggtccaaacaggtcagaatgaatatattgaaatggtttgaacacctgctggtattgcagacgtgaaccaacaatatgtggtctcttcctgctttttcctttgagacagtcctgacactgaaaattgttaaggttagaccaatcaatttcgtctatagatagattattgaaggttttatttttgatggatgtatagattgactgaacattgacgtgacctaaaatgcgatgaatcatgtctaaaggaaatttagtttttaacgcatttacagatttacgagttgcagtagatggaaatacaatatgatgattggataaccaatgtaaaccatttgaggagtcaatgtttgctgcaacatcaccattagcatcttcaatggtgttgagacgctcgtttaaaaacagatggtgagaacggagatcactagtagataaaatggtgtgatcaattgtgggtgtgtaaaaggcatgaatttttatttggctgccatttaatgtttttagaattaaatcaccctcttgatcgtatgggatatccgtgttggagcatgaggttatttgaacagattcaggatgagagtcacgaagattgtgcaacatctctttatgttttacaagggtaaccgtagcaccggaatctagcatcatataatatgcaggatttagtgaagttgaaataggcctaagtaaggttggatcgactgggttattttgttgaggaatagaggtgctatttgaatgggttttaacttggctaacctttttagaacgagctttggtagatttggcttttggcttaactgttgaaggaactgtagtatttttggtgttcaacacagtagatgtgttgtttgctcgtttattcactgatggatttgttggatactgtttttttgaagaagatggaggattaggggaaaaatgtggatcggaaatttgtgaagcttgatggtagtattgatattctctcttgatagaagagaaaatgtcgtttatagtatatggggtatcactcttaaaaaagtgtttagaaatggattcgtaagtacctgttaacgtatcaagaattgtttgttttagcaggtactcgtgggtttgaagatccgtggggttcaattgatcaattaagttatggagataacttgtaaattgaaatgctgggtagccaccattatattttaaagatctaatagtgttgataatggtattgacattactgcgttcaatgtcgtatgtcatggcctgacgaataacatcatagggatgcatttgcttgtgaaagcattcttgaacccaatcgggataactgctctgaggaacaagggtgaaaaataaattaattaaaccttgagattcttctggcgttggatctcttacagtacgatcgtgtgaatcaggaaccaaatcttttagaccagaagcaatcaaatgttttattaaggaatgaacccaggagttaaatagaccaacactagagcagtaaaataaagtagttggaatgtatgggttgttatatgtacatgaatggttaggtgaacctggaaacattggttggattggattgatgggagaataatatcccggtagttgaccataataaggaaatggcatataagcgaaaccagttggttgttggtaaccgtttattggaatatgatggtcatatgatggaccattagtaccagaatcaggataggatgactttccagcctgagaaggattgttcggcgtggaagaaccgtatggagcagattgctgatctggagaagcattgtttccagattccctagaagatgggtcaacatctgttgtagcatttaaattatgttccaactgagggttggatgggatgttggatgcagtggaagcgtcttgactggtatttatgttaaaagctttaataccagcgcccgtggagggatttacagcactaggatcactagtgtgtccagacagaaagctaccatgttgagaatgagcgcctttattcattggatatatagtaaacattctcaatattatattaaacagatttagtatacaaaattataataaagttcttcactttctttctttatatacaacatagaaataataatatagaaagattgtaaataagataaaaataatgtatgaagaaatccttggctttatatatgttaatattcagccattttcctctacgaacagtaagatatttaataaataaactcaacaacttttggtgacctctcaacaattattactcaacaatttatcgtttagtgtctgctaaaatcttattgttctatctattttatcataaaacattctatttcaacagtaaatacaacaatatatatcccgaaataaacacatatccaagattaatatattaacagatatttgaagctagtagaatatattactaataaatcgcagctaaacatataatatgaagggttgggtaagtattgctgaaatcgaacgttctggaataaataaataaaccaattagagtttagaaaacattaattgataacaaaatgtggagaatatattgtctgcttatcagtagatgtaaataaaccttatcaataatttggtgccgtacataggtgagataaaccagatatgaaaatatataaaaccaacatttttttcatatcatgtttcttcccttgttcatcgtatataatcatccttgtataccatatatatatataacattgagactgtatactatttgtctaattattaccagtgctgattctccataattatattcatacatggatattatttggtgtcatttcttctttctttcaactaattacatgtaaatcaacatctcgagaaagtaaaaaaaaaatgtaaggagatatgaattgctttaataaaaaaaaaatcagcacattatatgtggagtaagacagatatgatgaagattgatgtacttaccacattatcaaagatacataattaagaaactatgagtagtgtattgtctaaatttagatctattaaggatatactaagtcgaccaattattatattagaaagacaaattgaatatgggaacttaatctttgggtttgaacaaagaaatagatacacattgagtgatactgacggtagacccctgggatacttactagaaagggaaagatcattttctcaagttatacttcgacaaatcacaaaattacatagaccttttatcgtagatttctttgatattaataataattttttattcacattacaacgtaatttttcatttattaattctaaagtaaaagtgtggaaccaaaacacgaatggtgttacatttccagaaaattatttagttggtgtaagtgaacaacggtggcatccatggaaaagaaaatatgatctttttgcccaagatggtttagtgacaagtcaacaacaagaacctcgccaactcagtcagttcggatatattgatgcaccatttctttcatatgatttccctgttaaagatgagaatggtaaaattattggaagtgtggatagaaattgggttggcctaggtagagaattatttactgacacgggtgtgtatgtaatcaggtttgattcttacagatcattcaaaggagtttatgacatatctatgttaagcgaccatattttgaatctgaatcaaagagctgttttactaagtaatgcagtttcaattgattttgattatttttcaagacattcaagggatgtgagtaatggtggaattatatcctttagtaactatgaatgatttgataatttactcgatcctataaatgatgtgaacttcccaaaaagtttttatcattctttgctttgttttcttttttttttgtgtattgcaagaagtaatgaatcatagcaaaactgatgaatatattaaagtagtattattatttatgtctatttgttaatatatagtttattgctttgaaagacccatcaaagaaaattttaacttatccgattcagaatcaacattattcatatattttttaattctcttgataataataggctgattaattaaatcaacgttttccaaatcaatttggttcattttattaacgtttcccaataacaatggttcttctttaacagatcttccgtctaactcccataattttccatcatatgaaataaaactaataaaatgcaagttgatatttgtttctgggccaggattagttgtttcacctgaagattcattaaaatcttgattatgcttttgtataaagttaataataaattggtcaatattagaacagataatttctttgttattattcagaaattcatctaatggtgatcccttacgtaattttcttttattattaatcaaaatatgtaataaagcatagagtccacaagcattttgaaaattttgtttcaaccaaataggttgttcatccttcgaaatcaaattactggagtgataatttggtgataaagattcatttttttgaatagggaataatagaacaattgcaattactggtcttggtaaaaatgctaatagttcagcgtcatcaatggaaaagatatcattaaaattataagaggtactcaaacccaaattataagcaaatctatcaaagacttcagggttggattctaatggtataacagcggttaaatctttattcatttgatttagaatatacagtatgaaagtgtttataaattgcttatagatagattttgatagcacatatatgctcttttggaagagtaaaaatagttgacggcaagaagaatgtaaacgaataattactaaagactatttaagaaatatgtatttataattgaaactactccatagtgacttgattgtttatttttccctttatatatcccacgtagtttgaataaaagaagaaaaaaccaaatatttccttttttttcaatgatatttttttcatttctatcccttgttatctacaaaaaaaggttagtatatttcaataaagataacctttacatatattatttttgtagcgactaaatgtacttgctaccaaatgtggatcaatagttgcatacatagcctgctatttcattcaaaataatgacatatcttgcgaattaaaatagaatagcgtatttttaatgatgtatccaatttttaagtacataatatttttgaaatagttagaaggtagttacatagaaagggatgaaagtgagttaggaaacttatgtaagagactcaacaatatcaatccagttatctgtgataattttataattatgatctcttacgaatgataacacttttcagaattttgttggaaaaattttgtaagtttgagcaagtcatttattaactccacatatcattattaataaaaataaaagtcaggacatgaaatagatatacaaataaatgttttgaaaatatcaaatggaaggtttttatagtgtcagatgaatactaacgttagatcagaagtttattattatagataatttctattcaatcttcatcttcataatcatctacagcatagaaattcaccttcaaccatagactacatgatgtacattgagtaagtacttgaaacatgccatcctgactctctgcagattctacagcaaattcctccagcaaatcatcagtcaatttgaaactcccattagtttgacatctaggacatttttttgtatattcttctgtttcctctagaaaatcaaaactatctaaagacacttcatccacaccttcaccaaatttataaaccccgcttttcttattctcttctaataagttcttgtcgtattccttccgtagtttttcatcagatagaaccctatatgcttctgttattttatcgattgaatgtatcttttgtgaaagaatgcttctagaattttgcaaattttgttctaccttatcaggatgtgtagataataataactccttatagattctttttaattcaccagaggtagtgcttggtgtaacatttaatatttcataatacgtctgtccttttctcataatcaaccttttttttcctctttactatgccggcttgtcaggtgtgatttgtcacaagacaacaaattcctgtaaagtttttcaagaagtgatatttgtagctaccacaacaaaaaaactgttagattctgtagttcagacagtttattattcaatcgtactgagataagttcaaattctttttaatatttttatagttgaaaaaaaaaaaaaggaaaaaaaaaacctaacagtgtattacttttgaaagtcatcaataaatatttaaataaaaagcctacattattcctaattatattttccttatataaacagagaatgaggagtctaggttttagtatcacacttaagaagtaaaaaaatgttattccattcaaggagcgttggtacattcccaatctgttggttcatatgcttcagggtgatctaataatttcattttttcgccaggaatttcaaaatcataaactttaagattttcacgtaatctggctggtgtcttggtctttggcaatggcacatatccatgttgtaaagaccatctaatcaaaacttgagttggtgattttttcaattcatcagcaattttaactaaaccttcctcttgcaatttataaccatgtgtcaatggagcataagcttctaccaccaggccttcacttttacaataatctgctagttcttgtctcatacaccatggtgagatttcaatttgattaactacaggtttgtattttaaaccttcccattcaaataaatctttcagatgtttctcaccaaaattagacacaccaatatttttcactaaaccttcatccacagcttcttgcaaagctttccaggtctcaattctaagtttcttaccacccaatggagaatgcatcaataatagatctatgtagcctaaatctccaacacatttaacacactctttgattgcctttttagcattatcatatccgaattgggtgttccataattttgttgtataaaaaatctcatctcttttaaccgtcggatgtttttttaaccaatttgatataccttttgctacttcatattcattttgatataaaactgcagtgtcaaaatgacgatatccttcatctaaagctttttcaacaatagaagtagtgtgagatctaggcaaatcgtaagtacctagagctatagtgggaattgtattattagacagtaacttatattctctggggatagacattttaattcaataattagcaaaacaaatatatagaaaatgcgttgttgcgatattttctttatttatttatttgtttctttatcttggctttattagatatacttgcacagatacagttagaatcagaaataaactggttttaaacacaaagattattcaagttttccttactactgtcaaactttctaatcacccccccccctttttttctgtttttttttttatttttgcctttataaatgttatttgggagatgtgaatgcaaaatatcccacaggaaaaaaaaataaacgaaaagatacgaattctcgaggacctttctcctgcttgctgagcttaatttgaaattttgatacctaacaacagaattgaggtaattaccagctaacaactaaaatagtaaggagaagataacacaatgtatcgaaatttttttccttttcatgagtcgaagaaataagtgtatttattatatatacatttatatgcaaagaatatatcatatatgtgaaaaaagtagaattaaggtaaacgacgtgggaagtaaggaggggaaaatggctctagcgacaatcatgaatatataatgtctaaaaaaaaagaataaacacgctgttatgatcacgtcagaatgaaattaaacaagcgtatagtcaaatcaaagtatacttattcgatattttaaaagggaatagtaggagaggtgcagataatgggtaataacagatgatttgagtcactcaaatcagttcaatttctttggtttactggccttgtcactgaaaaaccccaaactttctagatgcgctctaacaaattcatagacagtgaaggtaacagcttgtcctggggccactctcataactcttggggtaatacctttatataatgcagctacaccttcctctttgattaaagtagaaccaatggcagtaatacgtttccatgaagaggtattttccctttcacttttgatggtcttatctttttgtagacgagtcttaatagtatctaatggagcatttgaaaatggaccaatggcgccagagatcaacccaattaaagacgtctcccatgatggtaaagaatctgtaccatggaatttttgcaagaattcttttagcttggagtaaacggtgaaattagcaccctggttagtagcttgtctagcagctgtcagagagactcctctataaagtgcaccaaaaccttcttcttttacgatcatataggcagtgtgaacagcatttctgtatctaggagccgcagtggcaacagaactagatgtagcagatacggtggtggaagaaacaatattagcagtggcaccatttggagtagcagcggtagcgacaacattttttgcaacttttacagtaggttcaggcaagtgctgtgcctgtaatctaatttttacaacttccatcggattcaccaccataacagcctcagtaacacctgccatcagcccggcaatgaatgtgttaccagtcgacacttttccggtttctttgtctgccagtaaagttctataccactcatatgaggagaatcggatagccatctttgggataatcccaatggccacagcacctagccctttatataatgctaagaaaccttcattgtgatagatggttctgccggttttaataaaacctggtggtttggtacctggatgttcctttgagtttgttcttctaaatatttgcattctaactttgattgtatctaaaggatgacaacataatgcttcaaatagaccagctgtaccacctgcaattaaattaatgactggagaagatttttgtttgttgtttgacattgttacagaaataataattatatatgtgtggatgttatgaaggagaatgtgttgacaaaaatttttttcttattatgttgttattattagtttgtagagataaatgaattattataaaggtatgcaggaaaagactaacttggaatgaatggtatattaacaagttattttatgaaattatgaattattctttctctttctttttatttgtgagtgtatgtgatttattcagacaaaaataggttgtaatcctatcatttagcacaaataataactaatattgcttttgttataacaaatttttaaaagcacaagacaatggaacagaaaggataagaaaaatcgcacagtaccaagattctaactattaatatatttatatctttctgttaatcaatatactttatattttcgccttctttttcttcttctttttgtgtatcatgagtactcgcacaaacaaacgaaaagttcaagtatatcattatatggttgaagattttttatttgggaatagttccccattaaaccgagatgtggtgtaggattataaagcaattcaaaaaaaaaggaagagagagagtgtgtgtgtgtgtgaagccaaacagaagagaggagtgtacaacggacaaccacaaaagcgcaagtctatgtcgttagacagaaatctggactgcaacagaacaacaattgggacaggataacccacaggcgtacagcaccacatgacacaacacaagaaagatccagaagcagaattagtaatcaataacacaaatagtattcgttcttctaaatcaattatttattcaccagttcaaaccaatttttccatttttaagaatcattattatcatcatcatcattacaatggtaatagcaatagtaataataatagtaatggcaatatttatcaagtgtcttacagcacaatatcctttttgcaactatttagctgcctatggagatatttcgccagtggatcgaaatgacacaataaaatgtttttgtgaagtaagccttattcattaattcattcatccaataacttcaacaacaaaataaattggaagtgaaaaaaaaaagataaaagaaactccgttagtccgaaggtgttgggcacaatttcattttgtcttctattttagcatcggaaaaccggcgaagaaaaaaaaggggagagttgaatgaaaaccttcacatggtcactgaagttttgcaggtaataaaaaaaaataaaaaaataaagagaaaaaaaaaacaataataataataataatatatgatgatgaattgtttaagatgacaactttttttataagagctatcagtcaaattaatacattataatgtttgaataaagattcatgttattcttttgcctttaaactttcacacaaaaataaatatatatttatatttatacaatattaataattgaagttgtattgtgtgtttcctactaaaatagtttttttttattattttctaaatgaaagggaattaataatttactagatatcattatcgaaggtgtctgtgcttgttttctataaaataaaataaaataaaataaaataaagatgtgtataatttaccgactgtttaaacgcgctgtgtattgttttggttatatttaatgttttctattcttttttttttcttaaaattatatattagtctaccatgatctgttccttatacttgtagggaactactttttttttaaatggccaggtaagtagagtttgatgtttttgcaaacaatgaataatgggtagttttttcttttgttaataagagtatatttaaaatttaaataggcttggaggagggaaagaaagggagagatatttagggctcatttgtgactacttaaaaaaaaaaaaaaaaaaacactactttacctggataaaagaaaaaaaatttttttttcttgtgttaatttttcttttaaaaaaacatatgagtgtatatggcaaagaaggtaagattcttacttatacattatctacttgagatatgactatatagtaatactgaatatggatgtaagaaggttttattttttttttcttttttgaaaacacatacatcattatttattcttgaacttctattaaaaactgtttcagattcacttgcattgaaactctaaacatgatttacaaggataattacaaaataccctaaatcaacataatagagtaatttaaatagaaaactatgtaagcttttatttatcataaggatattttaatttattttttttctttttatttttgctgtatatagactttttcataagagacaatagcaaactatcagagaaatttaaaccatcgttatttctgtaatttcctttttgtaatatttttttattaatattgatattgatattggtattggtatatatgtgtgtgcgggtttaaacaagtctttgaatcgtttaatttgtgtttttcttttttttttcacattgttaatgtttggatttcgtaattctacttaattacatcactacacctattatgttttgttgcaacaaaatgtcatttaataatcgatggagaagttgcctattattgttttcggatgtatgtcgttttactaattttggttttaattgatttgtttttatttttccttagcttttgttatttttggaaaaataaaacatttctgatccaaggcgcttaaatttgcattgtgtttttttattttttttgtttttaaaatttgttgttgtatttccactaaaaatagtggtatcagaagataaatagccgctgtcaaaatgagtagtaatacacaacaacaaatatatgactataatcattcatttggtttgtaataaagaatgaaagaatgtaaaagaaatgatagtatataactcatacgtctacatgtacaaatccctattttttttggtttgtttgtttatttgatatcgattgataaatatattcaaataaacatattgaaggttatgttctagaatctaggagaaggattggagaggggggaccagcgatactaacataaaatattatcaccaactgtaattgagcaacggatataaaccaaggtatattagaaaaggaaaaagaagtttacacaagaaaataacaatggaagaatgatctaagaaataatcacaaaactgaatcagagtttctttgtttgtttgtttgttttgttattgttactatttgttttcaaaccccagcattttaccgaacgactctatctaaaagtccagtctcgttatttctttattggtatatatctataagtgtatataaatatctatatatatatatagaattctctaacaacgtatgtggaagttggtatgacaatagagaacaaagaaagggatttccatttgtgttgacagttaacttaataatagccacaacattgacaaaaatatcacaattaagaattggcgcacttaagtgaattcttaatagtcttgttgttctttattgatgttaatttatatattacctttgttgcaattttgtattgttgttgttcttcttaaaacaaaagaagagaaaaaggcacaatagaaaaaagatccacaattttaaaagttttagttcaaacctctattatttaaaaaaaaaaaaagagtttttctttttttttattttttattttttaccaaactaagatagattaacatatctcttagattcgtatgcatctgtaaattaacatatggccatacataaatgtaatattaaatattattttttaaaaaaagatatagaaagggattggagaaggggttgcactgaaggaacctgatgattaaaggtgtaatttagttgtagtagttttcttctttttttttttttgttttttcattctttattttatttttaaaaagaatcttgagtatttaaagaacgccaaatttggggtttttttttattattctgctgatgctttcatggaattcatagcacttgattatctaataatatgtattaattaagtttattttatttacttttttgttgtatactcattttggaaatcagttccataattgaagcataacctgtcacaactacatcaacagagttgggaaatcggataaaacagttgtcgtgtaatctcatactctaatatcttttttctggtttttttatttgtttttattcccctttattttttttttgtttggagctaatgactgacacttttatactacagttacctgatatcgatgataaggtatattatataccagaatttaaacaatgcgaaacaccgattacaacattgaatattgctggtgcaactacagagaaaaataaaatcagcgatagtaatagtagtagtagctgtagtgatagcaacagcagtgattttttatccactaatgatagtttttattatgggtttgattattatgatgttgaaagtatttatgattcttatagcagtattactaatacaacaacaaaaacaaaaaatacaattatgatggatattaataataataataaccttttttatgataaaagttttagtttggaatcttctttgaatattgaaacacatgtgaagtatttgtctccatatattcaaaatagttttgaagacgattgtgcagacatatcaactaaaaaaactcaattccaaacactgccaattatagattcactaacaccttcttttgaaggttgtccacaacaatttactatttttagtcccgcacctttaagatcaaatgatatatattgctcattacttcaaacagaaaatttgacttatgaacaatatttaaggtcgaatgaatataataatgaaaaaaatattgttacaaatggttgtcaatgtggcaatgattatgatttcactagttattattccaaagattgtttaaaaagaagtaatagcaaaagaaagaataagaaaagggataaaaaatataaaaaaaagtatcttgatcttgatattttatctactttttctaattattcatcgttgttttcaaaaaatgatcaaaaaaacactaaaattaaaaaagagatctccagtgataaaaatgcagataataaaaaatataaaaaaaacattgaaaaaatttcacataacaatataaaagaaaatagactaattttaaagggatcagattcacaaaagactgaaaacaaattgagtaataatgtgaacagcaacctaaattattgctcttttgattttaattttatcacaataatcgaaactaaattaaaccgatataatacaaaaactttaggtagacttatcaatagtgattctaaaaacccagaaaatagtatccataacactaatcaagacattatggataagattagattacaagaagtttcttatagattttcaaaatcatatttttaattgatgctcctagcatggcataaaagtaacaaaatttaaatgaaccaatgcatacaggttaaaccacaaaaaaaaaaaaacaaataaaaagaaaaacaggaatgaggtagctattttattgtgtttaagaataatgtcttttttacacagtttagcttatacatatctacatacatatatttatatttgccttaatgccttttggtgttgttaatagtgcttaataaaaaaaacaattaacagaaaggttaatttctatcgaaaattacttacagatatatttctgtgtatatgtattttggtcaatattaactttcatgtttaccttttttcatgtaaggtaccaaaacttgtaactttattgagtagttctttaaattctcaatattaccactatatacccccaaaacaaagattacttatgaaatgctctacttaaaatttgcaaaaaaaaaactggaaaagagaagatttaattaaatttactttgtattttaattgcatatctttgtgtcatttgttgtcttcaatctttcttatataatgccaaacactcacctcaggttttgattaatttctactctaagtagaaaagttcaaaaaaaaaacatttaaaaaagttaaaaatttatcttaaccctatattactaacacaaataaattctaaattttaacaataccctacttagtcagaagaaaaaacaaaataaagaaatgaattcaactagagaaaaataacacaactagctttgtttgcaaaccttcatttcttttctttctacaactaaaagaaaagacaattaaaaagattcctttaaaataggtacataatgaaagttcggtataatatactcccgtatgtcttaaattagaaatcaaccttattcatttttagcaacttcacagaaaagtgtaagaaaaaagccaactaacaatcaaatcaattttaattcattcgatatggaatctagtgatgaggatgaaaaatttttatatggatcggataatgaagatcaccttgtgactaatcaaaagttacacaaagttgatcatactaataaaaacgaaacttcaaaaaatattcaaagtactaatccaaaaaataatactaccacagcacataataatggacacaataatgaaaatataagtaataaggtatctacagatgaggacaaaggagatgatatagatgatatagatgaagagatagataatgacgaagaagaagcagaagaagacgacgaatataatgtagaatttattatcagtttaggtccagacaccacgagattggatgccagatccaaaaatattacaggttcacaaacagctgccagtgaaactattagtgtagtttctaccgaatcaactgatatatcaggtaaaatttcagaattaaataaaaataaaaatgataccctaagtataaacgagaaaaatttagatgtaaatggaaaacctgacaatattgaggctggatccattgaccttgataaagatggtctctttgatggaagaccaattacagaaattgatccagaagtgttaaaagaaaaaccttggagacaacctggtgctaatattagtgactattttaacttcggtttcaatgaatacacatggacagaatatttgcatagacaagaaagattgagagatgaatataatccaagaagaatacttatgggtttactcacactgcagcagcagggtaaattggatattaagactaattttgatccaaacaaaaatgtaaactcttctacatcctccaataatatgattaataataacagtattaataacaccaacagtcctttaaatatcaataacagtaacaattcaaatataactagtggcaacaaaaacataataaacactggaattaataatccatcaatgataaatacatcatctcctgctatgcctcaggcatttcctactatgccaatgtttggtgggtttgcaccatttggaatgccagggatactaccaataaatccccaaccaaatattagaaataatagtaataataataacactattaataataatacaagaaatcagcaacgataatagtattacccatataccatacttaaatagttgatatagatttttaaactaatatatgcaaattttcttgaaagaaaaatgaagaaaaatcaatagaatacaattaataattgattaaatagataacaatatgaatattcagttttatataattataattaatgcaaagaagtgtctttttagtataagtcttaatttacctttaaaggtcatcggctaatcttttaatccatggttgatgtgttacattcatcttaataatatcctttaaacataaataccattctctagtctcctttccagatagttgacaattaaagctaattgtttcattatttttaaaaatcaatgtgaaacattcaccaaacaaaaatagattagtgaaatttctatatgattttccattaaaattctcttcatccatagtgcttataatttctttaacgttcaaaagattaatggttatttttggtttcatagtactttcattatacccagtcagattagttccacaaagtttaaaataccttttttctattaaaccattcaaatcaccaccatcttgtacaagatacccttcctttgtaacgctttgctgtttcttgaatttttcagccattgaaatagcatcttttaaggtttttggaaatttttctaatggatcagttctttctgcataatatgcgttatattttaatgaagcgataacaaatggctcacgacgtaaaagatcttttgataatgtcttctgattactgtccttattcggaatcaccttagcccactgatttagcatatttttagtatcaaatgactgtttatacttcttatggtcctctaagaaattattgctaatagcaaactctactctagcaaacgatccatcttgtgcaaataagtaatcccattcatcataattgacctttctttcagcaaattttctttcataaatgtatttgcttttacctaatccgccaaatgattttccaacacgaactttttcaactacttctactaactgtttctgcggtcttctatatttacatttcaatgtgaggtataatttttcttcttttccttttgaaattggtatgcataattgattgtctagaattaaacatttttcattagatacagatttccattccgtctttgtgacattgataccattgtctatctctaaactaaactgggcatcgtgttgctttatactgattaattgaattgacacgctatctaagttaataaaaagataacctgtttcaggatcagaatcaggaatcctttcatttttggtctggtagtgactaacagtttcttcctgggttcttacaaaactatcaactgactgttccaaactgattatttcttcattactttttttgacactcttagactttggttttcttttctcttctgttattaccttaaatggactagatatatgtccagtaaccttattaaatgctctattagaatacggagatttcttaatcggagttgttggagaaatactcacattagcactttcttcatcgacatggaaacttttgacactatcagcaatattgaccgatgccaattttcctggtgttttcaaagtttctgaggaaaattcttcaccaaatacatcaacaaccgaaacatctctagaatgttggcacatttccaaatttgtattacaggtagattttggccatatttctattggatgatgaatgatacttgctgatcttgatggaggttctgctatcaaattattcaagactatttcaaattcttggctcaaagaggttatcataccattttcagttttatttttttcaaggtaattgatttttgtattatgtattaacttaggtttaaatgaataattaatattttctacctttaggtttccttttttgtcatttctttccaaataagcagctgatgaatcctttttcacctttaagtcaagagctggttcttttttctcctgaagacgccatatagctagataattatcaggtttcatcaatacttctctttcaatagtatatgaaaaatcatcttctgggctaaaaatatcatctataaacttggactccaaagcaggttcctttggaattgatgggattctaacatctaattgtttttcataaaccacctgttcattatcacgaagatcctcacttccagatacattcttagtattattcccaatatctatttttattctagaggtggacaaaaataccttttcccctttctctttgttttcctcttcttctttaaaatcaacggactcagagtattgccttactgaatgagataaagattcattcattgaagattgttgtccttcgatatttgtttctacattactcatttctacagatttcaacaacacgttatttggttgcattttataggcaaaagaatcatattgtagttcagaaaccatggaattttcttgatttattttagcattgtttgtaattaatgcttttgatgccaacacaccttctcctatactattatcacgctcatcattagcattatttagagattgtcttttaaatttctcacatccagtagatctagaaagctgagaataatttgactctgaataaaatgaacatgaagaaggtacatcagattttaccatttcgctatttgtgactgatgtaatttcaatatttttcatattcgaagatatcgtattgaaaaaattatttcctacagatatattaagatctgctacagattcctctgtttctgagactggaagtgattttgtttgattttccttagctgactggtagtcaccaattgaggtagcaatactaatcattctatttttatacaattttccaaaattagatatcacttcactgggtattttctctttatctgaactatgcatttgttcattatcatgtttaactgggtctgttaacaaattaaactcatcctttatctgtgtagtagaaagttctattttatcatcattgtaagatgaacctgaagaatatctagttgttggtacatccaggttaaattgttcaaatattctatctgtgccgttagcactctgtatctttgctaccgatttatttaaaaaaatattagctacattttcttgaagggacatattatgagctattgggattctagagggtgaatgtagtatttctggagaagattgtatattatcatttttatagatatttattggtgataattgatccgatatttgattaaaattatttccctctatttctggagtcaataatggaatagtagagccaagactaaaagatctaggaagtgatgcatgttttctaatcctttctaaaaccacaacatcaagtttttcagtaccatcttctgtctctctgcttttacatgtttcgctttttacatcagattcactactttgttctgctaatatgttgattaatttaagagaattaggactcatttgttttgtacaggattgtgaaagattaatatatgtaccaccagacaaactttctatatttacatttccaatactagatttttcagaatcattgtgaatctttgactgtgagttatttgtttgttgtatcttgaaaggagatgatagaaatagactactatttgaatttacttgtgtattaacttcatcatcaggtatcttagagtcttgcgttgttaagtatttgtcttgttcttttcgatttaaactttccattatctcttcattataacttttttcattttgtaacatggaattatccaattctttgtacaaaagctctaaggtggtttcaggatccattgttgtatttatgaattcttattttctaattgtaccaaaattgttttatatgatctcaaaaaaatatgtacatatatatatatgatatagttgttattacaataaaagaacaacaacaatagtaacaacaataatattggctaaaagagccttatctgctttgagttttaattagaggtgtcaacagtgcacaaacatattcaatataaaagtatgattttgtttactgtttttttagatgtatttaagatacaactactaaccatcttgatttgtagttatattttgttagtagtccttcagaaagtaaataaacaagaacaagtcgaaacaaaaacaagttaatgtttatataatttcctaaaagggaaaaccaccaaatggacgggatgtttactcaaagaatttcccaaactggaaattgaaatctggaaacaaaaaaagaacaataaccaatcctagttaccttattatttatatttttcccacaacgtttctattgttttttttttgtaagtaaaaacagtaaaaatagaaaaaatctgagaatttcaatttactaataagaaaattccactagttaaacaatgtattctgccaaacaactattaacacttattttcaatcaaaagtaacctgtatatataaacaaacattataaaacatttagtaaccgttgtagttaaatgaatgtacggcgtttaggactttcagagatgtttattaagaccacacaatagcaaagttagataatttgtattatgtatattctttttactattacttatgccattaatattaaaaacagtggcatattccaataaaaaaatattatggcacacaacttagtacctactatcaggtattcctatattttgcagtagaagaagaaaaaaagcacataacagattgaagttaaacaagcaggcattatgttgaacaaatctcagtacataatacacattcgaatatatagtaatattggaatgtttttggttctccgaccgccaatgagtagtgtatcatactaaaaaattggcgtttcgaaacaacctgaacactctcttccctctaggccatataatttttcttacacatatacacatatattatttgtaagtatcttaagatgtgtatttaacattgtataccaaccgggattgtgtattccgcagcggtttatgtaaattcttctgtttattccgtctaaaaaaaaagggggctgcaactttttccttttattatgtggcatcaaaattaaaaaataagaaaaagaaacaaaaaatttttttaaatggcgcagttcgccttttcttttttctttttttcagttttttttacttatttatctaattttaaaccttggatcatcttttacgagatattgagaatttaaaggtgacatattattaaacaaacaaacaaatgaataagtgaatgaatgcatgaatgaatgaatgcatagataatttattaagtataccaaattgcttacggtagtagtatcgtagttattgaaacaccattttctttgcaaagccacatccataaagagaaaaaaaataaatagtaagtagtaactataaactaccttacacactccttttcgttgtctaatccttagaacactttacaactattttattatttgttgtaatagaatcatatctacgtaacttctttttaacttcaaatattttttttttgttttggtttttatattttacagttccccagcaaactccccctgtctcctttgtgatataattaacacaactatactaaattctgctaactgtacaataatcactagctagcttgtgcaaatatatttacttttataaaataaaaaaaataacagaacatagatttaattccattttctttttatttagttataatataaacatatatttaactatcgatttttcaagtttatcggaaataatatccaataaggtacaggatggtcattaaaaaaagtgtctatcgacaaaacagccgtacaagtagtattagtaatactactgcaggaagtactgataataataacaacaataataacaatagtaataatctcgataacagtagtgggacgggcaccaataatgttagtaaaggcatatcgaatagtatcccagaagttatcgatcctggaattactatcccaatatatgaggaagatataaaatccattgatattgaatctccacaaaaaattgggtcttacagaacaagagctggaaaattctccaatacattaagtaatttattaccttcaattagtgcaaagttacatcactcaaagaagaatggatctaaaaacgaggatactccaactaatagcaattctgaatccactataaatcttccaaatattgtcttagaacaaaatacttcagagaaccctgtaccaatgaaagatgattctataaatgattttatatctggtcatctgactccacctaatgagcctatacagtttcctgaatcaagtaatcatatgttaggtggtccaaggacatcaaatgattcatttggtctttctttatctaatcaattaaatccatcatctataaataatctaaatggaaatgacaatatctccaggacgaggaaaaatacagtaacttctcaaattacttctatgtcttctactactcaaaatcaaactatatggacaaatgacgcaaattcaggtattcacatgattcatccattccatacatctatgatatccagtacaggcaataatcataataatcacaacaacaataataataattactatgattctattgtgcccacactctctggcacaaatgtgattgcaaatgataatggtttaggcaatactttatcagtacaaccttccttaaatcaaaacaagctatgggtaaacaactcttctactcatagacaaagatctatgtccaatgcatcaagcgtctatatagatgctccattatatggtgaacaaaacttaaatagaaatatagttgcctcaaccaattatattccgaatataaataccaatcacattaacaccaatgaaccatctgagtcaaaccttgatataccatttgtctgcgacgatatggatccgcattctttaaactgggtttccatggatttaaatgtaccatcaataaaccaaataacaaatttacttccaaccgatactatttcaatttctaacattttttcattacaaagacaacaacctaacttaagtaatgccattaatttgacaagtacatcattagcaacgttatgctcaaagtttggtaaagttttgtctgccagaacttttagtaatatcaatattgctttagtagagtttgatagtgtagaaagtgcaactcgtgcaatgacttctttacaaggtaaagaagtctctgtagttggagctccaagtgaagtatactacgctaaaatattaccaatgcataatcaagctcaatccttaggtgggactgaacaatttatgctgaattctaaagataatggcatacaacaatctcttttacaagaacagttacattgtggtgcagtaacgctccaacaaaatggtaatgtttcaattccagtatttaacccatacccctactacttgcaacaacaacagcaatatactaacatgaattatagttcatatatgcatccctcacataccactatggaaaaagatacttgcccattcaccttacctcctccatctttgaaagaaaatagggaagaattacaggatattattgatacatttgatgccaaaagagacgttaaacaaatccattctttgttacaatcttcttataatttccatggaacttctgatactactaattttggtccattgcccgatccattaagtaataaagattttgatgcgcctacgttaagagagttacgtaaagctatcgacaacaactccttaagtgacttagaattagaacagctagcaatttgcatgctggatgagttaccagaattgagttcagactacttaggaaacaccattgtccaaaaattatttgaaagatcatccgatattattaaagatattgtgttaagaaagactaacctttatttagcctcgatgggcgttcataaaaacggtacatgggcatgccaaaagatgattaccatggcaaccacaccaaggcaaagaatgtttgtgattagaggtatctataattattgtgttcctttatttaatgatcaatttggtaactatgtgattcaatgtgtgttgaaatatggatatccatggaatagtattatattcgagagtattactgcaaatttttgggttattgttcaaaatagatatggatccagagctgtaagagcatgcttagaggcaaacgatatcataactacggaacaaacattggtattagcttcgataattgtgatatacgccaaatatctagccacaaataacaacagtacgttgctgttaacatggtttttagatacatgtgatttgccaaatagatattctattcttgtttcagagttattaaataatatagttgaactttgttgtcatagattagcttcattgactattttaaagatattaaattatagaggtgattctaaagctagaatggatattttagaagcagtgtttgataaactctcttctaacgaaccaccagatactttaagacaaatcttgaatgatacaaataatggtccaacttttatttacaaagttctatctatttcattgttagaagaagatataaaagcacatattattaaacaagtgagaaaattggttatagatataccaaatgcacaacaacatcgtaaattgatggaagagattggatttcagcctgtgcaaaccacaatggtcaatggtcagttaaagcacaaacgaagtacatcccatatccataacatcgaaactacaaaccatatgagaggtgtgtctatgtcaagtgtgcgcagttccaattcaagacataatacattgatgagtaatttcagtaataacccgttatcaatgcaacaattacaaccagtaacttctaatggtggtgtttcttcgaataacactagctattataattacccaggtggtttcccttctaacaattattctggcaacaataattatgcatacgttgcaaatattgggaaagatgatctagtttcacaaatggattcactttatttgggaaatgggacacaagtttcattgcctcaattaagtataaccaatcaaaataacaacacaaacattttacaacctagtagtagttccaatcaatacctagatgttactaggtataatggttaagagatattcaatctttacactgtaacagtattgtactgctgtattatgattgaggactggctcctcacattttctgttttttttttttttttttttttttttccttttttcattctaataactgtaaattttacaattgtcagtctacataatgcaatatttatacataactatgcatttacatacatttaatagataataaaaagaattttcacattcattttcactatatatattaaaatattaattctgttagttagatagctagcaaatgttctagagacacccattcctccacagcaagacatcttttttactgtctctcttcctttacgcaattgtacaactgtaattgctgtatatattccacttcttttattgtttcgtaagatatgaccgtaaggaaactgtatttttgaagtttgaatcattccacatttgtcaatttttcttttttttgtaaaaaagtcaaacggtttattattatgcaatattgtaagagtggtaaagtaaggcggatctagaagatcgaaattaggacaaaaatgagtctgtagttgaaggaagtcgcttgttaattttctatatgtgttttcgatttatcctcactaaatcaatttgtcgtcttaatattctggtctattaaatcattctaaaggtaaagaaagaagaaaataggaaacagattaagatattatagtcaaattatcctaattgaagttacagaagatcagctagttaaccttagaaacaattttttttttttaatttttgttctttgataggttgttgaacccgatattttggccgtagtaattaaatattttcaatctttttgtattcataaaaactcaaacatacataaagataagaaagtaacgcaatttgagatttttgtagtatatttgttacctaatttcatactttcaaaatttccttaaatcagacaaaagtagtttacttccttttagaaaattttaaaaattattaataaatggagtcagatataaataataataacaactttcaaggtagccatgttccgttacatagtcaacagatgcttaataatagacaatatataaatatccaaaatcgtataccattatttagcaactcaagaatacaacaatcacaaaatatgtcaatgcaccaatccgaagagaatagggatgtggacatggttgatgttataaataatccatccactatagtccatacccttaataatgatgcaagacatgatcacatggaagaggcaaaagaattactgttacattacaatcaaccactaatcgatatatctttgtatgcaccatatcttacagaaagtgacatcgaaaatattaaattatttcaatcagcatttgatgaaaagataaaattatgttttgaaacgattgacaatagaaggaaggaaaagattgaacaaattgaacaacatcaaatgatgttaatgtcaatgggatatataaataatccagatctgattcatcgcattaacattttacagaagattagtttgagagcaatggagacagagacagtagctttacaaaagttgagagtgaaaattgcagacattgtaaatgactttaaaggacatcttgaggtttatataagagcaagaagagaaaatcaccagatagaaaactttcctcttcaacatcagtcctatttgaatcgccttgatatgaatgaatttgttatgccttttgagaatacagaacctcaattaatgcctacgaatgtttatcagtcaaaaacaacaacaaatgatgatcaagttttacaacagttgtttttaagaaaatctaacaattctacatttcccctgcataaacttccctctgaaattcttcatttagttctggacaagttaacctcaaaatctgagattgtgaatttactaactgtatgcaagttatgggcattaataattgttaaaatactttattataggccgcatattaataaaaaaagtcagttagatctgtttttaagaaccatgaaattggattccaaagatacaatgtttaactaccgtttaatgattaaaagattgaatttttcatttgttggagattatttatatgatgactatttatactattttgttgggtgtttcaatttagaacgtttaactttggtattctgtaagcatataacaagtagaccggtagctgctgtccttacaggttgcaaatatttacagagtgtagatattacaggtatcaaggaaatttatgatgatgtatttttaacattagctgatagttgtaagagagttcaaggcttttatgtaccgtcagctggtaacattagtttttatgcgttacagatgttcacttcaagtgtccctatgttaaaaagagttaaaatcacatccaatactttgatggatgataagttattagagattatggcagataaatgtccaatattggtagaagtcgatataactaatagtgtaaatgttacagacaagggtttaattaaattatttcttaaattaaatcagctaagagagttcagaattacacataattcaaagattactgatagagtgtttttagaacttgtgaagaaacttcagcagcttcctgcattaagattagtagatttttcaagctgtgagaatataactgacaggaccattgagaaattagtagatttatcacctaaattaaggaacatattcttagggaaatgcagtagagtaacagatgcatcactattcaatctagcaaggctgggcaaaaacttacaaaccgttcattttggccattgcttcaatatcacagaccaaggtgtacgagttctagttcaatcctgtcctagaattcaatatgttgattttgcatgttgtacaaatcttacaaatcgtaccttatatgaacttgctgatttagtaaaattaaagagaattggattagttaaatgttctcagatgactgatgaagggttgctaaatatgatatcgttgcgtggaagaaatgatggcttggaaagagtacatttatcatattgttcaaacttgactatctatccaatttatgaattattgatggcgtgtccgaaattatcccatttatctttgacggcagttccatcctttttaaggccagatatcacagcattttgcagacctgctccacatgattttagtgagaaccaaaggcaaatattttgtgtattctctggtaaaggtgttcataagcttcgtcattatttaatgagccttaccacacccactaatggccctcaaacagacattgatgaaatattagcaaaatatatagtagcaaacaatattattcaacagaatgaaaatttagaaacagctataaatagggtcatccataacttgaatcaagattcagcagctattttggctgcaacgggaataaatcagggaagtgagatttcaaatgattttacatttcagaatatcgactttgaaagattagatgatattttcaatgcatttaacgaccaattttttaattcatattcaattatacctgaacatatagaacatctacaatcaaaaatagataggaggtttatagaagatccttttaatgaatcgtttgaagagagggaacctgtagttgtgccacatggaagtagagagattaacagtgaaatgtatcatattgtaagaaaattccatgaaatagatgaaagaattgatgattttgaagttaatgtagcaagtcttgctagggtacagtttcagtttactggattcttgttgcatgaaatgacgcaactttatttacaaatgatagaacttaatcgacaattaagcgaagtgcaaaatagagtcaagatctcaaataatgaaaaggatataaaaggtcttttcgtttggagaatgatgttccataataaattttcaaaactactccaaaagtataaaatatcgactgtagttttacgcatttatttaaaagatagtattacatttttaacaagacaaagagagtgggcaatcgagatggagaatatgaattttgtgaatgcatcaaacaataataatgtcacagaaaataataatgtcacagatgacattagacagtcccctcttcttagacagttagttggtagagcatcactaacaccagatcagattaggttgatacaacgttctatattaaatccatcaaatcttagaggtggtgctacaactaatcaaataagaggtattcaagaaaatgtaaatgaatctcagacagatgagagatccgggacacctgttgattgattatttagaaattcataatgtgacaaggattgatgttagaaatcaaatggcatgtatattcgttgacataggctagattgttatatataaaaaaaagttcttgattgatatttttagcattttgaagtgtaatttcttaaggagtgtttttgtgcagcacattctttgttgaaatttaatgtgcttaaaatatgcaaagtgactagagaaaaatttttagttagatcaaaaaaaaaaaaaaaaaaaaaaaaaaaaacagaatattaaaaagctaagaagtaaaatatcgaattttaaaaattatatatgctttttatatagtaacatttaatagtagtcaagtttattggtcaatattaagaatataatctaaataattgaggaagtaaaatgttcatttaggtaaatctctatatcaattatcgtagttttctaaaaaatgaactagtgattgtaatgtattcaaatcatgttcattgcttgtattcaagccatctatagtgctcaccgtctgcaaatattccctatccaataattctagttttctatttatatgatacttgtaattcttagttagttgatcaacagtaaaagaaagccattcagggaaagtcattttaagctcgtccttggaaagtttactaatgaaaaaattgagaataccttctgtatcatttgaaagtgtcgcactattaacttcaataagttttaacaagtattgatacttaagatcattcaattcaaaacttgagtcagagttttcaaccaatttggaaaaagagaacggttcatctgtattatcattaggggctaatattgtgtttgtgtaggaagtttcaatttgtttatttacattacagttaatctctgagtttgtggtaagtggagatatcattttatcttcggatttaatattaacatgaggagtacggttatcatttggtatagttgttatatttgtttcatctgtctcaggcatgcctaagccgtcgataagacaactctttctcctgtggtagtaaagaagaagatgttatatttttctccggtgaaggaatataatgatctagttcttctgtaatggaagagctagatgttaaaaaatcattattcgtctgtatctcaactagattttccttcatattatttttgtttatcattgtatttggaatttttgtcgccaaactggcccctgataaaattcttccaaccgggttgttattatcatgttttggcttattctctttttcatcttctatacgagaaacactagacttctttctctttttagtagtagacagttgttgatcgactaaatcttttcttaatcgtttagaagaagtttcattgactgttttcttcactgtcaatactttttcaacgctcaactgtgcctcagaggctttagaatcattgtttgatttattctcattattgagttttgcagatacatgatgtgtgtccaaattgttttcttgttggatgacaaatcttttattctcttccgttaatatattctccgagtcaattttattatttccatcatttgaattcgtctgtaataacattgtagtattatcattgtgtattttttttgatatcatttgatctttttcttctcggttggtagattcagtatattgctccttttcatcatcaattaacagtgtattttgttgctccagattatgaataatggatgagggagcagaagaatgaatattcttttcaataccgggcacttctgaactagtagaagaacttttgttatcgtccatttcatcggggcccatgggtgatcgtaagttggtgctattgttagctatctcgctctttgttccagctgtctcaggacattgtaaatattgtttgtctactataagtttttccttatatatgggactctctaattttttcaaaggcgataactgaaacaaatgagatccattattactaaaactaaaatcatcggcactatcgtctaaaatcttgttagttctagtgatttctttctttctattaacatggtctgtaaaattcaaaatcaaatctttattctttgacaaatttactgatttttctgaagatacatcatcattaaaagttgtatccgtatttgatactattctttgtggtaatttccctaacagtttctttcttttttttatattagtcttgcttagattggttgtttcctttgtctgatcctgtaaaatctgtgtcttatcatttaagttattattattatcattcctatcatccttgggagaagtgatgagtgtaggctgttgtttaatcttgtgatatattctttcttccttttcatcacttgtgtccatatcattctcgtatgttggatcgctttcttctatgggctgtgatttgtcactcaattcatagttatctcctgttgataattcttcagaagtaatattaccctcttgttttgaatttgaatccatattatttttatctacattttgactacgttcttcaatattatttgcagactgatctagattttttagctcttctactttgttcatctgttcaggagtaaatgtggttttgttctgaatatcatatacatcttcatttttagaccgagatatatcatctttagtcaagttttcataaagtaaagaattatgaataattgaatccatagaatctgttggttcagtctcatcaacgatgttgaattcatgtatatttcttaaatctttaaaatctggaaacatttgaattaacttcttaaaaaaataacaatgaccgttatggcaggccaaaaaatgcctttctattggttttagagtatcattaaagtttaatctgataatagttttacaatatatacaaaatacaatatcatatgaggaagaggaagaagaagaggcagaagaagatggggatggggatgttgtgggaagatctactatataatcattattattaaaagcattgaatgaaagatcgaaacgtatcaaaccagcattaataacatcattaatcttatctttattccaagtttgatttgagttcaaatcaagaaaactcgtcctgaatatatttcttgttattagattaaaaggatcattgaatattggatcattagaccaatttgacgtacctaaactatatttaaaatctttaattattttcaatctaagataacttattggacaatttaaattatcaccgctcaaatgttgcaataaaacattggatatagtttctagtttgtctttagactttgatctgcaatgtttcaaatcgaaagtgtggcgatgacaatagatacaattgatggcatctttcaggattagatcgctattttcttgttcgattggatcaaaataaaatcccatttgtgctaaccaatccgaaggtatcacggtatatctccatttgtagtttttttgactaatctttttggactttcgaaacaaatctaatctttgtttgtaatttggaatcgtcataaggtagtttcaaagatatttaacgtctaagcacacaaaataaaataaaaaaaaaattaaaagggaagaagaaaccaaaaagaaaaagagatgtgatattagtttgagtagtaagtatttgttaataaattaggtgcaccgttctttagctagattagtagttcctatataattataaagcttaaggcctcagatttgggtaaggtgtatgtatataactgacataagttgtctaaaaagatttaagtttgaaaattgaaaagaaaaatatttcgaggtttaattttcattttttttacttattttttgtccttcaaatcataagcgcaaccctcaagccacagaaagaagactttgcaacacacactcctatataagcaaagaaactaatacttagataactgatgttcacttgtctacacaaaattccattgcaagcagaatactataagagtttttaaaaggtatgaaaagatagccaatttcagaatatttacaccgtacggctaatttttgcagcactatatagttttttcccgtaacaaccatacgactaacatattattggtattattctaaaaatgttattaagaaataagaggaagttattgagcgtactattgacaattgtattatttgtaggagtttactttgttagtagagaagttaaattgcaatatatatctaaaaatataatacgaggacctgatcaggaatcgtctaccattcaacaactaagtaatttattaaaaacaggtaataatgatgataactataatacaggagatcaaaacagaattgcttattatgaagataaagaaggagcctcaggaaagaattgggaaagtattatgccaagtatgacggatccagatgcaaagaaggaattgggacgtgcctcatggaaatactttcatacattattagctagatttccagagaatccaactgaagaggaaagacaaaaattggaagattttgttcaattgtacgcagaattatatccatgcggcgaatgttcatatcacttccaaaaaatattaaagaagcatcctgttcaaacctcaagtagaactaatgccgctatgtgggggtgtcatatacacaatattgttaataaacatttaaagaaggatatatatgattgttccacaatattggaagattatgattgtggatgtgaataggaaggaatatatttatattactgaataagattacatctaaaaatgaacatatagttatatatatgtatatgtatatgtatatgtatagttacatgattgtacaacatccatttgaagagtcattgtaatgttcatgtttattagaattatatctattattatggtacctatttgttataaaatgatttgaatttggtggtggatatccccatatttcaggtaatgtatagtctcttgttgtttggatatagttaattagactaagacaagcattggaagcggtgattctttcacgactaagttcttccctcaagtttttatttaattcattaattctttttaatttcaaatatttgatttttagttgtaattgtagttgttgttgttgtttagatgacatggtatactgtaataatgataataatgaatcattgtatatatatatttataagggtaatccagtaatgagtattagttgacgttttgttctacagtactaagaatgtatagatgtcagtatatatattagataaagatatatagatagtaatagagatagatggatgtatatgtgtcattatttaataaatttgaatttttaatgaggttcaagttcacaaatgtgaccaattttccatttcaggtaatttgtagtaacatattgatttcatacttattaaagtaagaaaaaaaaataaaaataaaaataaaaaagcataatacatggataggcaattagcgtattttatatcagtagtggttggaaagaatataacaacatgtaaagatactgattgtagatgaaaaatgtttctaaacttaaaatgaaatgataatatattttattaaaaatatggaatataaaaaaatatatatatatatatataaactaatttataagatatctttagggatataaaaactcagccgaatagaaataaaacccaattaagaccagtaaaaaaaataccaatgatatgaatagtaaaactacaaacttaatgcaaaaatgaaggatatattatacttttttttttcttttgtatatttaaatatgctgttttcaatgttattacaacaataataacggtgttatgaggtatttattattataataaagacaaagagttgtgtctttgacgagcttgtctatttgcattaatagattgagtggtagtagtaggatcgacattggtggtagtcgcagtgacagtggcagattcatgtagagagttttttcttgaacaggttggggtaattggggaaacaccattaataacgaatggttgagaaacttcagtagctaattgtaaaaaggccattttttttcttttaaacttgattatatatatacgtctgtgtgcttgttggtatttgtatttgtatttgctctatttagttgaagtgttttgtggattgttacagatagttaagtggaaagaaaaacattctaaagtatcagaagttttaaagttgttcactttatatatacataaaaaaaatgtgacaagtattcacatttgtctatatgcacacacatacacactcattcagtctctcactcacgcactttacagggaaaaaaactgacttagtcatcattatttgtgaacaacgtcatagaaaaaataaaatgaggagtaaattgtataagtcatccaactccactttttcttgttttcaaccgacatgtggctgttattggcaaataaaaatgaaaaataacaaaaaaaaaaaagtcattcgaaaaaaaaaaaaataaaaaacaagaaatatatgacccactgttttctcctttgattttttttttttttttttgtttttttttttccgttgtattgtgtcacttttcttcttcgttttggtttcatgcctgtacagcagattcaagtgatctatgctttttttgtatttttttgtttttttttttttttggtttggtattgttttgatgacctcgtcatcatttaaccttcctcattgagtagtaacagagattagtcatcaatgatataaaacccaacgaaacatttagaacaaagaactctatggaaatagaataaaaaggaaaatttagtgaccaaatctcgataatttctatgagctgttctccccacttttaataataagtgaaacttgcccattgttactattgttgcagcaatctattattctgtgtctttgtcggttcgtgagaaaaaaaaggtgtgagaaaataacaacaataaaacaatggaggcgttagaaattcctctattgtatctttttgtgtgtgtgcatacgtgcatgtgtgactatacaagaaacgctatttaaagcgcgacaaataagtgactgagaaaaaaccaaaaaaaaaatagtggtgtaggtcaaagacaagcctcggatctttccgaaccatttcttacaatagagaataatagtaagaactatataacagtaataatgataataatagtaatagtgaattgattatgtaatggacgaggtgtttcttcgcttcttttattagtttttttattcgctctacctgtatttgaaataatacaatacatatttacatatatatatatatatatatggatgtgtgtctgtgtgtcggtcggtctgagcatagatcaatgcctcaaagagacgactgttttgatggaaatggggacgttttcgataatactaggcattgatgtgagtgtgatatgtagcctctaatatggcctaggaagattaggttggagatttggcattcaccaacttctgttatctcagataagggcagtatactcttttgacctagtctattccactgatacctaatatgattaatttgtactcgatgtaatagcagttgccatatgatataagtttcatctttaagtaatactgtttgtacttctagatcgttgacactgcttagatattgcttggcttggcctgttgtgattaatttgattaagttatgatagtatgttggcacaccagatatatcaaatcttttgatatagtcttgtcttattaataacccctgcactaacagttttagaggtattagtaattttaatatcgacttgatctgagatttgtaccttattgaacattcagataatgctatatcaaggtgtttgatgctcttcatatgatcgttcgaataatatccataatataaccccatgtagtaatggaattggactatttgagattttccaattggatattttacattatcttgaacaagcataccaggagtgttgttactgttaccgttgttcaaacgccctctactttcatatactttgattagatttttaatcatatctttgttatgtaattgtttatagattttgaattccaaattaataaaatataatattccacaacgtttattttcaatgtcatttgggtttctatcgttgagacacatggtcaggcatttgtgtatatttctaatacaccgttccattagattattttgttttgaatctgatacgacctcaaagacaggataattctctgactcaataaaactgtataatagtttcgatacattatacaaaggatacactaaccatgtcattgtatcgtctctttccatgagtctaattaggacacggatctggttctctaaggattcaataagtttctcttttaaagataacaattcagtgattttctttttttgtttggctttaattgcattcttggtatccagagtaaagttaattttatgttttttgctattatattctggtagatgaatgttcttcaattccatggtaacattatacaattccaaaattctggtatctttgatttgatttaaaacgaatatcaaattgtcttgtttggggttatcatttttaccaatattcttgattttattaccagttggaaatgttaagaattttataaacttatcatcccattttttattctcaaaataataatcaatattgacttgttccattttcgtttaatcttcttatgaagtatgtaaatgtgttagtataagggagaaagaaagtgagtaaaaaaagctagtaacaaaatcagtccacacgcacattcatctatatatataaatgtgtgtgtgtatgtgtgtacgtatatatgtatgaaatgctcgtatcctttactatccataaccttaatgttcaacttcaaagttgaaaaatatttgaaaaagttttagaaagttttgttttctttgtttctcgaggactcgaagcatgcagtgcagtataatttctgtttgtgtgtgcacataaatatatggtcactgtatatctaaaccagctaacaaaacaagaaaagtctccagtttccatcaacacatcattagaacggttacttctttctccacaacacttgtatttcaatacatataaagatcaaaacactcgtgaataaacagcttacatacacatacacacacatacatacatatatataaagatattagattctgtggaatatgcagcgtaatgtcagtaccccattggaattacatgaattgaatatagttaataagttaaatactgatctttgtatgtcaaaaataatgacaggaagttccaagaacggaaccaatgcatcgagtgtggctccaactaccccaaagaaagggcaatcatctgatattccaatgagtgggccaagattaaatataaagacaacggttatatcaccaaagaaaaacgagttgaatcagtcagattcagagtttgatgaaagggaaaaattatataaattggcacaaaagaaaagagagatcagtgagttggagatgaaattggtgcaattgaagaaagaactgaagattatggaacaagaattgaagcctatattaaataagattcattcaaaagttgtggacacgaaaaacaacagaattaaaagcaaggagcagggtggtggtaatcgtgctgatagtaaccttgacaatagtaaccaacataatgatgataatgataatgataattattatggttttgccgataataatgaccctgatagctcgttaatcaacatatctcaacatataccaagtaaattcaaagaaaataagtttgtcaaaactttattaaataaatttaatgaattcaatgttaatgaagatgagtttgatgatcatgttcgatcacagaatgattcaagtttttatttaagagaaggttataatttaggtgaagatgagttggaaagagaggcagaagaagagatcggctttcttcaaaaatttaataaatggcaaaataaacagattaacaaacaagcaaacaaataagtaagtaagtagatagatagatagatagatagatagatagatagatacgttattactagacgtgatctttctctctttctctctctctcttttccttcccccccttctgacgtatacattatatatgtccgtgtgtgtatgtttgtatattttactcatattccttttaaatcaagtgaatcaaataaataaatgaaggaaaaaataagaagtggaaaaagtaagcaaaaaaaaaaaaaataagtataaataaatgcttgtgtgtgtgtgcgtgaatacatctgtcaataagaggcgtcaaatgtatgtgaacaattagatatgttttgcatacagtacgatagtatatgctttgaggtaaacttttgccacatataaaaggggaaaagttcaagtaaaaaactacgacagacaatggaagataaattagaagaatataagaagttaaaacaagaattaaaacaagagttacaaaagaaaaggatattggaggatgaattcgataaattacaacaagaaatatacgataaagagaccgaatattttacatcatccatatatatgacatcatctaatattctttcttctacaagctccactactggtacatcgtcaaaacctctgttgattcccggtaatatcattaaaggttttgatggtttcaataaacccttgcatcatgcacaccatgattataatcaagtgatgaacaatgacaatagaatcttttcattaagttcagctacttatatcaaacaggtatctaatttagacaagtacttacaagatttacacgaagataaacagaaagtatagacagtacaatatcatccccacattgttttttagtaaccctcccaatgcacgagtcttgatgcagaatttgtgttttacaaatattggactacttcgatgcctcattactgccactatcaaataattcttttgatcatttgtttatttatccaattaacatttaactcatttcgggtttgtttgtttttttttgtttttctgttttcttttttgttcgcatttctttctaaggaaaatgcaatgtaaagtgaagtgaagtaaaggagggagaataatgatgatgagaagaataaagagatacacacatactattgcatgaatgaagagaaagatattttatcgattgatcgattttgtttagctatgatcgatatgattctgttgtgtagtactgtctcgttttgtttgtttcacatagtatagacttatctatatgatttacatataattgcatatatacatatataataagtcacacgtttgtcctacatgctgatcctttttttctattgaggaagatattctaatttcatatttcaatcttcacagtcaataatgattggtttcaatttaatggttaaacggtatttatccgaaactaatcatatattagaacagaatgttgttgaaaagatatcattgggcaggaatatttccaatcgcttcaaattattaaacaagtcttcaactctagctcaaattactttaattaataaagatgtcccaattatgattagaagaggatcccttttagctatacatacagatattacagatgaggactgtttgactatctcaaaggagcatattaatccaatttggaatgttttaaaatttaaatcattcagatcctcaaattttaataagattcaattgacaaaagagtatgttacttcaattaatcaaatggatgattttgataattgcaagacaccaattcagttgcttgtgtcttcccatgaacaaaataattcgatatatcatctaaatttggatggagccttcgattggaatgtatggggtagtcaatcaatattggcctttgaacagaatacaagtttagaactgattccctcaaatagaatattgtttgataaattatcgagtatggccaactttaatatcttgaaaggcagaggcaatgtactaattaatggtcagggaaccataatcaagattgaattgaagaactcatatgataaattactagtcaattataagaatcttttggcaattagcgggaaatcacaaattgatatcaataattcaattaataataaattactgaatacaagtgataattttaaaaccgttaattggcaaattttacctgcttttaagtggggtaattatttgaaatatttatttattagttataaaaatgttgtcaatggaatttcttattactataataattggaaatatgggtatccaaatgagtttttagagattaatggaccaagaacaatactattacaaagctttgatacttttaaaaatgatgcacttgtaaattatcgtttagataatatattcagttcacatgttaataacagtataactactactaataataataataatattcaaaaaaatggagataatggtaagaattcaattaaatattggaatgcaagaatctatggagataatgaaaggatacaatttactccaactgacagccatttcaaaataatgaaaaattaaccatatatctaaatctgtatatatgtttatatatacatatattatctatatttaatcatagtataattgatttgaataaatttattttatataaagaatatttatatggatgtatatttggacggggaagaaggagaagatgagtttttttttatatatatacgcctttgtataagattatggagggatcagtattattaaaagtttcaagggtgacaataagtataagagtatttataaaaggtaatttcaaaataaaatttttattttctttgttttattttttccttaatctcgatactatcccgactacggtggcaaccccagcaataattccggctccaatagctatacccttcacagtttctctttgaatcttatcttccaccatttgtttcaatatttgaacttgtttattatggggctcatgctcatataaggtatctacatatcgtttggccatggtaaactcattaattttatagcatccaattgtcaagtagtataaacattctctacgtctgtttggtgattctttgtagatgtctgttaaaattttgattcctaaccgttcattattaagatagtttgatttgattaagccccatgcataattaaaccgtgactggattgtagcatcatcaccaccttcgttaatcacctgttgacgtaatatctctaattgttggggtagtaatgactcattggcgtcttgtagcgtgggtaaataatcgatatgagacatttgttaatgtttattgttttccgtttgcttctattattttaaaaatcaattgaaattttttgttcaatttcttttggtgatatattggttacaaccgcaaattactttagctcactttagtagaattggttgcttattcagaattattaactgcttcttcttcttttaaagatgactaaaggtggaaaaatcgactaatgaaaacaagaaaaagaaaaaaagagaatttcaaatattttctctggttttgatttgatttgaaaggctgctagagaaatgatatactttacatcacacaaccgtagcatgtgttagagaaaaacaggaagggagaaggttataatagccaggaagaaagctggttaacattttaaggatggaagataccactagattgaatacatcgaaactaggtacaaaacagtattgggatagtttttattctttagagagaaggaattttaagtctaatcctgcagataccggtgaatgttggtttaacgataatgatgcagaatcaaaaatgattgacttcttatctgataatgtaggtcaatatttaataaatgagaagtcatctattatagatttaggtactggaaatggacatctattatttgaattaaatgagaatgggtttaacggtaatatgctaggtgttgattattctgaagagagtgttagtttcgctaaagaaattgcacaagctaaggatcgttcacagacgattacttttgaacaagcggatatattcaatgaagactggaaccctggtcaatttgacgttgttctagataaaggtacattagatgcaattgcattaagtgggttgaaaacaaaagatggaagtcagtctattgttcatgtttataataaaattatcgaaaagttgttgaaaccaaatggagtgttcttgataacatcatgtaatttcactgaacaagaattgattaagattattgaaaatcacaatttaaaaacctgggagactattgattatccaacttttgaatttggtggtattaaaggtactacaatatgtagcatagcatttgttaagaagaagtaatagatgtatatacatatatatttgtatatagagaaggaaaaaaaatggaaagaagagaagggggattaagttctatatttttttttctatttactatatgtttatatgtatatatagggataaatagatacagataggttcaaaccttttgtattaattcttcaatcttatcatatagctcatcaattaaactaggattcccgcattttaaagcataggtaacaggtaaatttttatcatcaagagcaatgattctaataaatttttcactctgcaaagaacctgggaaccccttcttgattgaaaaccccttcaaaagaggtaaatttaagatgacttttaaaatacctcgggacctcataacgattcttgatttttgagtagtatcatctttatttaatttcaatgtcccaacacccttctctttccaaccttctttaatattatgtaattggtatagtttcatattggcttggaaaaggcaagtttcggtctcttcaccagatttgacttcttgtttatgtagtttaacatttttttcgggttccttgttttcagcaatagattttttatcagaatcatttttatcatgatcattatttttggaggaagcaggctgtaagtttgcaggcttttttccatctagtttcttttcttttaagatattgaacccactgccaaatgagaattgtgatccgaaggcaaactgttttacattcggtgatattatcttattatcttttttatcattttcacttgcatttttattttcatcatcatcatcatcattactattattatcattgttattatttactatattttttacaattttgaaaccagagccaaaacttgttgcagcaccaaacacaaattttggtttaatttcaattttctctttctcttgcttcttctcatctttttgttttttgtctttatctttttcctccactttcttttctttattttctgtttttaatttcttaatctcttttgtatcttcatgttcttcttttcttttcttgtcatcatcacctatagatcttttctcacttcttggtttattttctttagcgtcattgttatcttccacgtatttaacttctttattatcgtttgctatttgagtggttggttgtattgattgttctttcatatctacttgttcctcctttatctgatcagccatggcactcaaagtaatgatatgtatgtatgtctgtgtggacacgtattaatcctagtgaattatcaaatatgtcttgattgaaaagataagaagatgtgcatcaattgattataaaagaaaagagagagaaatagttatacatatatgtatggatgtatttacaagatgtatatactcgtaattaattaaatctttgcagctttgtttgatgtaaatccccaattttatgtttttattttttcattcacaagtcttctaaattttttcttttttttggcagttatttggaaagtatactacacccatacactcatatattatatgtattcagttttctccgtcatttccaacatattaaataaactaaaaaaaataagtatttgaagacgttttgaatattattattactaacatagccattatatggagaggaagataaaagtaaagataaagatatagatatagatagagatatagatagaattgtttaaagggttattatactctattcctattatgttatattatatcattttgtattggtatagtcttatagtctacgtcaactaaagcaccgttattattacaagagacttcgatattgatatcaaattttttatttttaatctcggtttgatctctgtaaaaccaggtgattttatcaaatttaacatcttttgatttgtctttaaatttcaaatttggttgatccaaacaatgttccttgatgtctttcaacagatgtttttcaacatgttgatgcaaatgcctaacgaatttctttgagtggcaatttaacgtgtccttaatcttttcagggtccttatctggtgtttcgttcaatacaaatggtggataatatttcagttgacaatgtagattatcaaattcactatcatcgtctttttcattcttcaagtagatttcaaaatcatttaaatcttcaaagagtttgatctcttcaccatcttttgttgtaattgtgttaattttaggacctttgtttttcttattatttttgggcattggttttctcttttattttgttttgttttgtttttctttaaaaaaagaaaataaatttggagagggaggagagttatatttgattgtatatataaatacctatatacatatatgatttaatactgttcaaaaacgatattatttggacagaggaaaggaattaagagaaatacgaatataagagattagtatcaagtgatacatacatacatatatacatatatatatataaagaagaaagaaacagagggagatagtttatgtgtgtatgcgtgtttgttacaactaatacttattttaacaaaatacgttggggtaaattgaaaacaaggaggggagaattaaattgagagataagagtgacaacattttcctggattttcattggtataaacccttatatatatgtgtgtgtatgtatatatgtatgtatatgtgtatgtatatgtgtatatatatgtgtatgtttatttattttgttcgtttaaatgttcacacgaaattagggtattagggatctgatgcggggctaaagatgttttttaatctactgagaatatgttcctccgtaaaatttttagcggtattacggaaacagaaataaatcacatgtaatgatattccaacgtatggatgcatatatatttagatgtatgtgtgtatgcatatatttatgtatttatatacagttatatatttatgtacgtgttgcgtgttttatgttttgtgttgtttgttttccgttttctgaggcgctagcatttggtttgtccggctttgtagttcctattgttatttcgatgtgttttgccatgtgaaaaatatatttgaattaaacaaaagaatgaacaaaagaaagaatgaatgaatggatgaaaaaaaaaaagcttcgtgatagattgccttcagatatgtataaaagaataatttaagaaggaaactaatgcatatatcagtatttatgtaggtatatacgtgtaaataaaattgtattcataaggatatatcatcattatgcatgacttaatatgacgaaggaaaaaggtggtgggtttatgatcactaaatataatttacccaattcaaaaaattcatcaggcacaacttccttgattagaaataaactgaactttgatgacggtataaaatggaatgagttttgtaaaattagaacatgtttgattaaatcttattttaagtctatcgatttggttcatatcaatttgactctctctgaaaataaaatcaaagttaaacagatagcagattgtcttagaatcgaatttaatttctctgtagatactgggcattatttcgaaaagctggttattttggctatacagtcaatgagaaggaatttaattagatcacaaaacaataacagcaatagattaaataaattagataaattagataaattagataaattgaacaaatgcaaagagttctcgcctttgtccaatggaaaagatggtattctatctaatactaaccttctttctttagtcattaacgatataataaatgatgtagttccactaaaggatcaaaagtcgcaccaaatagattctagcatgattcatggtgggttgcctgatctaagtatatttataagtgaagatcctttatctcgcaaaactaagaaaaattcacaaaaccttttgggtgataaaaattcaaaagattcccctttcatcccctttttcttaaaggagaaaatattacgtaatatacagaaatcaagaacttgttaccaactgtcgaggattgatagtgataggataaacattattgaacaacatcgcaatttgattagactgggtcgtgactcactaactttgtctagtagatacgtctttgaaagattttattctaattcagatttgaatctagtagatttcgtatttgaacaaatcaataaacctaagtttttatctcagttatcatttgaattattccaatctgctattacaataaaactctcgttgcatgatcaggaaatgttactgtctttattgaatataactttgggctcattgattaaagatttcggattcgatccaatcctgtacgatattagtgaaatcttgtaccatttagttttaatcaagtatccaagattatgtaaaaataataactctaatggcgtagaagagcatgattatgataatacagttttgagtggtagatcttctaaagcaaatacccctgatattgattcggatatggagtcacatctatcaaagaataaagacatcattgtatcctcactgtcgattaacccacagattgcaaataaagaagtgtacaagaaagttcaaattaaatatcagacaaaggttcaagattttaattttccattactgagtaatgctacacccacaataaaggaaattgttaataattgtaagcaattgtttcaaattaaaaaagatttagagttaaatatttattatgatggtacattaataaaaagtgatattaagttggcgaatttgtttaatgatttgaatattaaagtgttgtatcttgaattgaggtaggctctttaaaaaaaaaaaaagcaaacaaatgcaaaaaaacgcacgcatgtaaatttatataatattaaatatctggatagaaatatatgcaaaatatagttgttaatttgggtattatttttaaattgatactatttaatttgaatatagatttatttttggatgtttttttttgttgtaaaaatatatgttttgttctaatgtgaagtaatcgggataaaattccttgaagagagatcaagaaagaaaaaaagaagactaaaaaatctaaatactcacattacactgacacatcacctttcccacttgttacaacaaaatataagaaaaaaaaaagttttcggttactctttaccttacggatgaatatttatatttatttagttatatgtctttttatttttcttattttctttcttcctattttttttttatttaaaaaatttactattactgttatgataaatttaaatcactaatttcttgtctaatttcttcctcctctatgttggcttttatattatcgttattagcactattactaccttctcttaccatctcttccttttcttcctcttcattataaggaggtaattcagttacatgtaacttatagcctaatgaatattcttgatcttgcaaatttttgagacaaatatcaaaatattctttattatggaatccaatgatggcattatataaaatagcttccatttgaacaattcttctaccctcgtcagcactctcatcctccatcttattttcgggtttaatatcgactatcatctttacttcttctgcttcataaacaccaacataaaattctcttgttgtatcacttattgattcattatgctgacctcttaaattcagtaatttagggcattttaatttaataaaatccttcaatatagtccatcttaactttccatatttctcaatcatattggtcacaatatctattttaagcttttcttgtcccaaggcttcaaaatttattgatgtttccgtctctggcaagagataaggtgggaaattatccaattttaattgccacatctttctctctgtcatctgttttctaaaatttctttcgttaaatatactttttaatttctttggttgtttaaatgggtttgcaatcctcttatgacccatataaggataaataaattttggatctgtggtcatccccatcatatcattggtttgttcaggacaataaaatggaataccccttccaaaatcactacctccagcagcagtactactgttaatcatttcattatttgtatcatatgtatttataaaatgttgtggatatgaatatattttcttaaaatttggtgcaaaactccttgaagattcagttgtagaaggagaagaagttgttgtattagcggtggtagcactatagtcaatagtagacgcagtagattttgaagtatttatcacctgttttgagttatatagagattgattttgcataagtggagaagtggccacctttgagccaaaagttttatcctggaaaggctgtttcatagaaattgatgcagaagtaggttgtgatgaaaattgaggcaaaggaaaagaaattggaggaattggaggcatcatgtttgtaattgtgggtataggtgggactaacgatgtttggggtagcaacatgactcctgattgttgcagtgacgatgatggagaagatgtaggaattataggaataaaagaagggaaaggtatctgttcttgtttttcattagtttttatattggtagtgtcatttttttgaaaagtaggaatattaatggtactaatatcattgtttggcgagttagaggttataactggagataataaactattaagactatttttctgtgatgaagtaaaggacttttttaaaaaatcgttcttttgttcttttcggtactgtttttggggtaaatacattgttggaggaatcataggatacaaaaagggaagatatgtatatgggggagacgaaggataatttatttcattttccttttcttttacctgttttaattcatgctgtgccgcaatagagtaagacgtgaaaggagaagaagaagcagaagaagtagtagcagtagtagcagtggtagaaaaggaggaaaagttaagtggaaaaggagaaatgttaacgggtgatataagattagggataacatatgaatataaatcataattatcccatgtgtaagaattcaaacttagaatcaaatcgttgatcatgtcatcattcagtgtgttggttaaagtgactaaacagctttgctgcataaaaaagggagaaattaaagaggccatcggaggtaataatttgacttgaagaacatttgaatggtgaataatcccacctattaagtatttaatttgtttccaatttttatttggaggtaaattatcaatttggattaaaataaaattattattattattattgttattcatattattgatattgttattatcgtttatgctattattactaaatgaggtatgttttcttttatgttttaacaaagataatggtaattttgaataagaggaattataattatatttagaagtaaataacgaagtgtgatccttcttataactgttgtttactgtagaagtggtatcttttgctgttgtcaatgaagaggttgcagttcttaaaggtttaatagtctgaatatcttcggtttccttatcatccttatttgaataatccttaccatcattcaatttggaattactattactactactactattattatttttatcagttaaatgtttctgagctaacaaatccttctgagttaacaaattcttctgtttagtatttttacttttatcgatctcattatttcgaattctattactattattttgagaaacaaaatttttcttttgctttaatatatgatggtcatgtgaggccatcgctgtttatagtttttatatacaagattataaagatatagtcattcgctatcaaacaaacaaacaaacaaacaaaataaaagaatgtacagaaaagtctttctttgaaataatgtcatttcaaaattacaacctaagctcttataaacaaaccggaaaggaaaaatttactattagaattaaggttaaaaaaaccaaaacaatctttgaatctttcttcttcttctttttaaattacgaaatagaatcaaaacacaagggacaaaaaacaattatggagattactttttacagttctcatattgttgtatttgcatatggaatatataacataatatatctttaaacataagacaaacaaaacaagcaaacaaacaaaaaaaaaaaacaaaggaggtaaagaaaaggagaatgggaataggaagagaaagttattagaacaacaagatacacaatagtagcaactacagaaatttactattatacttgacaaaagctacaagataaaatgatataccactgaacaaggttaattcttccacacacacgatttcttcttcttcaacaaaagtgaattataacagactgtgttcagtgggaagtctaaaagcgaattctctattttaaaatccacaaagtaataataaagttattatgcttgcatctaaatatagaatatctactatttacagcatttctttatccttttttttcttttttttatttttcattttttatttctgcagtcttggtttattctgacacattccctttaaagaaattacgtcaatgattaatttcagggttctcttttcctgattttttgtttttaaaaaaataatttggattactccgaaatttttgaaataataagatccttacacccacatcatgtgaaattcacgtgatattttattttcttactttttccgtaaatattttcagtatatgcttttacaggaagctatatgatataaacacccatacatttttaacaaggtgaatttcctttttttttttttctttgaaaattttataaaaataacaatagcactaatagtggaacctaaaaaaacatttaaccaaaaaagtgggacaattttgtcccgcaatcatgcaaatacccaaagggttttttctttttcttttttttgttttttaatacccattctcaatttacttttttccagtcagttgttctgagacaaagaaaaaaccaaaaactaaaaaaaaacaaaaaacaaataaacaaaaaaaaataacacaaacaagaaaagtggtcaattttgtccatatccattcatttcggaactcaatggaccattttttttctgattgttagagggtttcctttttagtacatcatgattactttttcttttcttcattttttatctcacattttttgctttttcatatatcatgatgtataaatttttttccccctctcccagagaacttgtccttcgttgtatttttctttttcttctttgattaattaataaggtatagtaacatattctattttaacttgcttcaaaaaaaaaaaaaataaacatgaaaaaaaataacaaaaaaaaaaaatttttttcagtaaacatcatcgatgacctttccttccttgagtcacttttgaaattacataaagaatctatacattccatagaatttagatgagccttccaactttttagttgttttttcttcttgcttttttcgtttctttttctaaattattcatccataatatatatatatatattcacagaacttgcttttgactacgtttcttctcttgcaattctctgtcagcccctctttttccagttttttcctctcttgctacgttagtttgcttaatgcatatcttgtacgaaaccaacaaaccaacaaaccaataaaccaacaagagagaatagaaaatgcctttaactaccaaaccattatctttgaaagtcaacgcttgtttatttgatgtcgatggtaccatcattatctctcaaccagccatcgctgccatgtggagagacttcggtaaagacaaaccatattttgatgccgaacacgtcatccacatctctcacggttggagaacttttgatgccatcgccaaattcgctccagatttcgctaacgctgaatacgtcgaaaaattagagggtgaaatcccagaaaaatacggtgaacactccatcgaagtcccaggtgctgtcaagttatgtaacgatttgaacaaattaccaaaggaaaagtgggctgttgccacctctggtactcgtaccatggctaccaaatggttcgaattcttaggtatcaagagaccagaatacttcattaccgcttccgatgtcgaaaacggtaagccacacccagaaccatacttaaagggtagaaacggtcttggtttcccaatcaacgaaaaggacccatctaaatctaaggtcgttgtcttcgaagatgctccagctggtatcgaagctggtaaggctgctggttgtaagattattggtattgccaccactttcgatttagactttttaaaggaaaagggttgtgatatcatcgtcaagaaccacgaatctattagagtaggtgaatacaacccagaaaccgatgaagttgaattgatcttcgatgattacttatatgccaaggatgacttattacaatggtaattttcctgagtaaaaaagatttattaacatatgttttttttttgtcttttgcctctttattttcattttctttaataagctataattaatgtataattccattcacacacgtacaaataataaaaacaaacaagcaaacaaaaaaaaaggaacgaacatgcacggccatgtaaacctttaactaatgttacaattaatgatcttcgcaaaacttttttttatgttatttcaaacaacagtaagaaaaaaaaatcaatatgtaaaaattttaaatatgttatatatattttttttaaattttgatagatacacatagaaaataaataactaacttctactatagtttttcggtataagttacaaactcatatatatatatctgatttaattttgatctaaatgacaggagacaaaaaagacaagagtattttcagctataggtatatatatatataaatacacgtgtgtaacttatcttatcatatacaattatataataatatttagttcttttcagtagcaatgacttcaacttctaaatccacatttaatggcaatgctttaacagcgacacatgatctagcaggcttatgaacattaaaatatttagcatacagaccattaaattccttaaaataattgatatcggccaaaaagacatttactttaacaatcttatctaatgaagaattactagcttctaatatatttttaatgtttttgaaaacttgatcagccttttcagtaatggtaccttcaactggtttattatctggagtatatgggatttggccagagacaaaaatcaagttattaactttcatagcttgagaatacgaagcagcggctggtggggcattcttggtggctattggtgttaaagtgtttaatgatctaaagattgatggtctaaataaagcgtttctaaacattttaatcaaattattgcctataattattcgaagaatttggcgcgtattctacttcaagagatatacatgtatacacgtttctaaagtaaaaagagtcgaaaataaaaaagcgcaatttataatagtgtgtaacacttgaacatgaactgacatactcaatatttatatattggttatgacctattctttactctttccttatcttatttcaattattcaagatgactgatcggaatattggtcgctcgagaaaattttaattccaagcggttttccccccatttcttttcttttttcttttttttctttttactccctttatttaaacaaacagtgctatatcgatggagatataactccgtcattattatcaagacgtcttctagagagtagattgactgttattattagttgttgttaatatcacaagaagcacacatccatccgtagaattccacaggctaattctccaaattctccaacaaactctctcttaaaaaagaaagagaattacatggtttcggcatcgattcattatagccagctttcacttttcatccttcatcctccttctctcttccttctatcttctcgcttcctttttctccctgacatatttactagttcacatttaacctcacactgtattatcattttaaaccatatatattgaccgaactataacaatcagaattagtagcaaacacttaaactaataattagtcagctctgtaatatcacagagcattcatttagaaaaaaagatatccctctttcttgtttgcatatatatcagtcccttattcttcctcttatacatcacaacattatttttaactacgtattattgcattaaaataattggataataagagaacagagatactattctttctgtacactactttaaaataagaagaaaactgtcattttcttttgatgtaaaaattgacatgttttttttgttctcctcttctcttttgttttttttttcttttttttgatagttaatattttgtttttcttctgacattcgataagcagcttacacaacaaaaagaacatccattaataaataaataaagaaatatatacataaacaaagtatataacaacatttatactaacatcatctcatatatgacactttacaaaaagagtaaaaagaaaaaaaaacttcgttaaaaagactaaaaaggaagataaatagttcaataatttaagaaaaatacaacttccgattctcttaataacttgctggtatattttatccatttatcccccccttactcttataaatctgttttgatttttaaataatacagacaatttataatctttagcaaaatacgaatattatacagtaagacagccgcctatttttgtttttaatcaccattagaaatcctttaatatatttatctctattcatatatgtcatcaattgaaattcattcaaaaattggatctatccctatacaaattccaaacaatcaatataacaatataaataacgacaggaaggttaatgctacagaagacaactatatagtctctcacaactcaatacataataataattgcaacaattatccaagttgcggatctatctcaaatcaaaatacgcaacatgatcaaatatcaaacagtttcacaaattcatacccaacattagtatgtgttgatcatacaatctcacaaccgattgttataaatcaagagaaggttctagaaaattcactctcttcatcattccaaaacaacaacattccaaactcttttgagtctggatccattaataatgttctatacggctcaaacaatatgaatcacctaagtcagagtcttttttctggttccttaccaaccggaaacttagttaccaataataatgacattacagataacggtgctaccagtaagtcatatcataatggaagtgtgcctagtaaaacaacacaatatattgaagactttggtacaaacgccacaaccaccccaactcaatattttaaagaccatcgaacttttcataatcaaagtagtaaagaacctttacagcaacatctgcagacacagcagtttaatgatatatattatggagccaatacagttaatgattctacgataaattacacacctcatactactcctactttgaataataaacagaatgacaaagatttaaacacaaataataacaatcatataggtgctgaggaaaaaaaacatttattagatattgctgagtttccaactgaggaattattaaaaatgatgactgctttattagacaaaattgtaagttcgaatgatgagttaaatatgtcaagcccgaacaattcctctcctatcgatgacaacaatactgctcctagtagtatgatcacccccaccactactagtaaagtctcagaagataatgatagtgaattaaaatatgctatctcatgttttgccggcaaacatatcccacagatatctattgaacaatatcttctccgaatacaaaaatattgtcctacaacaaatgatatatttttatcaatattagtatattttgaccgaatctctaaaaaatgtaataataacgatatcaacaatgatataaatcaactggagagcaaacataattttgttatgaattcccataatattcatcgattattaatatctgcagtcacagtaagtacaaagtttttcagtgatttcttttacagtaatgcaagatatgctcgtgtaggggggattccattgcaagaaatgaataaattagagatacaatttatgcttctatgcgattttaaattatccattcctattgaagaattacaaaggtatgctgatttgttgtatacattttggaatacaaataacgatgaatgtgtaaataatattgctttagataacactaacaatagtaatgcataacatttttcaccaaaaggagtcaatcaatcaataaacatatatatatatatagagtcatgtaaccatattcttacaaaaaaataacattttatatctattgcataaaatattagtcaatgaacaacaaacagaattagttatatttccacttagatattgttttaaaatgtttttaatatatttaacctagaccctcctttcttctttcccttctcagtatttttttttgatgtaaagtttgacttactatgaactgtgaaaaagaaaataacgaacaggcattatagagaaaattataaatatttctattttaaaaagtttcaagttaaattgaatgaacagtagctaaacgtccaaaaaaggtgatactattcatctatcccagacatacgataaacaaaaaagtaatataaatatatacaaggtaataaatattatcaacaacttcttaatgttagatgatttcaccagctgtattatagcattgtatagattgtcttttgctgtaggaatagcatcattgtatattgccaaggtatatattcctgactttttagaatatggaaaaactttaaagaatcattcaaggaaggacattaatcctttattagaccaagttatccatttcactctaccaaaagcatatttcagtcatttttatattttgtcccttactctttcaataatcactgttgtgagatattatcaataccccattacttggattttactattccactcttctagaagattatatgaaacactttttgtttcaaaatatacaggatctagaatgaattggtcacattacgtcgttgggttgtggttttattctgtattacatattatactaaatactaaattagcctccaatgatattaattctaatctaaatatgatatcattatgcctctttttgtattcttcgagagaacaatttaaaagccatcaaattctggcaaacctgaaaaaatattctttacctcaagatagattgtttcaatatgtatgttctcctcattatctttgtgagattggtatatatctatcttttgtaccgtacaatctcgaatttctttttccattaatttgggttattgcaagtttaagtgtatcagctgcagaaactaaaagatattaccaagataagttcaaagacaatgtggttcccaaatatgccattattccgtatattctttaattatttaactgagtaataacatatttcaaacaagaccaaaaagacaattacaacaacaaaaaaattatctcagaaggttaagttagcttcaaggtttcttcaatcttacaaataaacattttctaaccaaccttctacctcataaatatctataaaaaataatatattatttaataatatgtgattataaactttcattatttcagatttattttaatctaaccaatttttttatttgtttatctttatttctttttgctaaacctgccactaaaagggcgatcagaaccgaattatagtcattatagaaagagctctgtggcaataacttctttctattagtacaacattatagttttcatcttttctgtagttatctctccttctatcttgttcagtaaatatttatctgtacatcatcaatatgttatttattacgattaatatgtgctccttacaatattgtattaaaatagtggagtaggctttttcttttttttttttttgattttttttttacttatttattatacatatgtaaaataaatagaccgtcgtaatagataaagacaaaaaacagaagatatctgtttaaacaacgacccaaatctattgaaaaagttcaatacttctccaatatacttatatcaattgatgataattagggtataaattcgattctcctcaatttatctctttgtcctttttgctttttactttagtttgctagatcaaatattagtaacacaaacaaaagttgttgggcaagacttgcacttttttttatttttaatctgattcaaacttaacacactacttcttcccccaatttatgcctagcagatattgtctcataattatactacatctatcctaagttcaatgtcatctagaattttatctttagaaaaaagcaatagattcgataataattttcaaaacaatccagagaataaaccttcattacaaacaccaaatacacagagtgttgattcatttgatttccattttgaaaacaactttgacgaagcattagataaattagaaatcaatccacatagagattcacagagtagaagaacaccaactaacgatatcgccactcccaatagtgaaaatattgaaatgagtagtttaaatgatagacttgatagcaattcaaaaaatattataagtgacagaaatgcattaatgtctgacataagtgatggtgaaggtccttcaaattacaactatcacacaaatcaaagatacaattcttcttcgaccaattttttaaaaagttttttcaattacataaaacaaactagttcaacttccagctggaggttacattcgaataactcctctgtaactttaaatgaggatcatatagagagacaaatacacccgggaacaactcctgtatatgataaaaataaatacccaacaaatgagatatctaatgccaaatatgatgcaataacttttataccgactttattatatgagcaattcaaattcttcttcaacctatatttcttaatagttgcattatctcaagctatccctgctttacgaattggttatctttcttcttatattgttcctttagcttttgttttaactgttactatgagtaaagaagctttagatgatattcaacgtaggaaaagagataaagaatccaataatgaattatacgaagtcttgaatcaatctagattagttccaagtaaagatttgaaagtaggtgatctggtaaaaatgcaaaagggctcgcgagttcccgctgatatggttttattacaatcaagtgaaggttccggggaatgttttatcaagacagatcaattagatggtgaaacagactggaaattacgaattgcttgccctttaacacagcatttaaaagccgaggatttgttaaataaaatcaatatcactgcttctgcacctgaaaaatctatacataatttcttagggaaaatttcatacaaagagtctacctccaatcctttatcaatcgaaaacactttatgggctaatactgttatagcatctactggattttgtattggatgtgttatatatacagggaaagatacaagacaagcgatgaacacgacaactgccactgtcaagactggcctcttggaattagagattaacagaatatctaaaatcttatgtgcttcggtgtttattttatctattgtcttggtgatatttgcaggatttcaaaactctgattggtatgttgatgttatgaggtacttaattttattttctaccattattcctgtctccttaagagtaaatcttgacttagctaaatctgtatatgctcaccaaattgaacatgacgatacaattcctgaaacaattgttagaactagcactattcctgaagatttaggccgtatagagtatttattaagtgataagacaggtacactgacacaaaatgacatgcaactgaaaaagattcatttggggactgtttcgtacacacatgaaactgatgatatcgttatcggatatatcaactcattaggtggtaaatcaacaaatagtgtgaatattactacatcaagaagggatattggtactagagtgcgtgatctgatcactactctggccatatgccataatgtcacacctacttttgaagatggggaattaacatatcaagctgcttctccagatgaaattgctattgttaaatacaccgaattgataggtctttcactgttcaaaagagacagacattcaattacgttactgcatgatagcagtggcatcactttccaatatgatattattcaagttttcccatttacctccgacactaaacgtatggggatcattgtgtatgataagcaacatgatgaatactggtttttgcaaaagggtgctgatactgttatgtgcaaaattgtagaaaataacgattggttagaagaagaaacagcaaacatggctcgtgaaggtttaagaacattggttgttggtcgtaaaaaaatatccaaaaagattctggaacaattccaaaaggagtataacgatgcgtctttatcaatgttaaaccgtgatcaacaaatgagtgctgttattgggaagtttttggaacatgatctagagttacaaggtttaactggtgttgaggataaattacaaagagatgttaaatcatctatagaattattgcgcaatgcaggtattaagatctggatgcttactggtgataaagttgaaacagcccgttgtgtttcaattagtgctaagttaatttcaagaggtcagtacgtccatacaattaccaaattacgtaaacctgaaggggccttaaatcaactggagtatttaaaagtaaataccaatgcctgtcttttgattgatggagaatcgttaggaacgtatttaacatatcataaggaagaattctttagcattgctttacaattacctacagtgattgcttgtcgttgtaccccacaacagaaagcagatattgcgcttaatatccgtacagttacaggaagaagagtatgttgtattggcgatggcggtaatgacgtcagtatgatccaaagtgccgatgtaggcgttggtattgtaggtaaagaaggtaaacaagcttcattagctgctgatttttctatcacacaattttgttatttaactgagctacttttatggcatggaagaaattcttacaaaagatctgcaaaattggctcaatttgttatgcatagaggtcttgtaattgctatttgtcaagcagtattttctatatgttctaaatttgaacctatcgccttatatcaaggttggttaatggttggttacgcaacctgctatacaatggcccctgttttttcacttacgctagatcgtgatattgatgaatctttaaccaaaacctaccctgaattgtataaagatcttacagaaggtaaaagtttatcttataaaacattttttgtctggtgtgcactatcattataccaaggttgtattatccaagggttatctcagtcatttaccagtttacttccagaggatttcacgagaatggtagcaattagttttacagcattggtaattaacgaacttataatggtagctcttgaaatctatacttggaataaaatgatggtcaccacagaaattattacctttttattctacgttatttccattccatttctgagtgaatactttgaattgaagtatatgctaagtcctaaattttatttcggattattcttaattctattactgtcagtgtttccagtatgggctgcaaagactatttatagagcactacatcctccaagttatgctaaagtccaagaattttcgatggtttagtaaatacttacagttaaaaaccatatataacatacattaaaatgcatatagacttttctaaatatctttctctgtcttcatttaactatgtattacaacactataaattgaaaagatacttaacttagtatcaaacttgtagagagtaaaattactatatacatacagggttcataagttaattattttttaaaacctataaaaaaataagaaaattatttaataccagtcatctattggaaaatatgcatttacttattttcggagtatacgtcacaactgttcttatacatacaatttcaaaacaaattatgactgtatacgaattttttatatctaaatgataactattcaatacacaatagattattcaattagtagatatagccttctctatgaatcagaatcactttccctcatatcatcattaccatctgatatggtaataacaggccgttgaaagtctgttgcatgggcccatggtatagtctttgaaaaactaccaaacatactaacttttctccttatcattgggtgatacgctgaggaaagttctgaaacatcagagtctaagtgatctctgtgcgaagacaatgtacttttaattgaatgattacctgaagaaacataattatcaagttcaatgtctatatctggattaactatcacaggatatggtaaaggtgcatcagaactaactttaaataagtgcacgtttgctacatgttcattttcaacacgaaagataatccatatgaaacgtctaagaacttcaacaaatgcaataacaaatgatgtagcagcactttgctggatggtagatggtgctattgcccatactatccattggaatctaaccatgacattccataccatagctacataataaactaacttccgctttccatcatatgttccatctttccaatttttctttccagctaaatataaatcatctcttaaaaataaattatgtttagagggttgaagtagggaccaatcaaacactatatcccaagtagaagtgaatatagcattaattaatgcacatacaataaagggagtacgagcctcaggtgaacgatgtgccattctataagcacataaagatgcattataggcaataccacatatatacttggccccattaaacagatgtgggaatttatcaccagagtctgtatatcttcttaaacattgaagtagtctccaataactgggcaaacaagataaaatacccatagtttttgaatgagatgatccacaaagacccttttcatttgttgctaccaggcaagaaaacatagcaatatcggacatagaatatgtcagagaacagaatatatcacctaagaagaaatcaccgaattcaacaggatacaatggcgccaacaccaatctaataatcctgataaataaccattttcttgtagagacaactttatcccaatatggaatcacatccttaggtaaaatgtacaataacactgttccacataaacaaacatatgaccatggaatcaatctttcatatttataactcaaggcagcacatatagacccccaaagtacaaaaaacatgatggtatacaattgtaatggaacaccagttgtagcgaaatcattattaaacaatttggttccatttttagttcgagtttctcctagcataataaatctataattaataccatttctatgccatatgaaacaatcaatttgaaataaaaataacataagtaacaccataaaccaaccaccccagagcgggaaaagaattttgtgaacatacgatgtctgtggagaagcaaaagacaatgatagaatataaacaaataaagtcacggaaatacctaaaaacaaacaagcagtagacatttgaataatggatctattatttctatgaataatctgctcagttagagtatattccacaataaatttctttaaaagttttgaatgctttttaacatctgatggagaatttgtgagatcattgatataccattgtttaattttggtctcccaccataagattggatcatcctttggatttgtagcagtaaggtctgtattaggctgatttgaagtattttgctgcatttgttgggccaataactgaatattaatcgagacgtgtttgaaaattgaataattgtcctttgcaaatttcataaatttgtctaattcatttgtttgtaaagtcttatcgaatttcttaaccattttacgaaaccctgttacattggtgtcgcgaaatgtcttgatcatttgcagataaagataatactctaatagagcatcacctagcaaattttgagcttgtttaagagtaatttcagagttttgaatgatgttatcatatgcgaaggtctcttttactgtgtgaataccactctgaatattagtttgatcccttgaacgttttaattgtgaatttctatacgtaagaaggtccctccattgactagatttttctggccacgagggccataacatattttgttttaaaaaatctttaattttaaaacccaaagaatcttcgttttttgtttttcttttacaattagaaatggatccatatagttcattttggcaattgttattattattactattagataaaattaaagatatctgatcatttggagatgatgaaaccgtagttgcaagagaaacatggcgaaacgagaggatgtcatcattactctttttatcctcaacattattacagccactactaccaccagtaccactactactattaatgatattcaagttcaaatttgaattatcattagcattaagatattcattttgatacatttgtttctgtaaattatagatctgtagttgtgattgtaatatggaaaattttttctttgcttcatctaacaaccactgataaaagtcgttacattttgtcaattcttgactaatcaaccacatctcaataaaatctttgattgcatgtttttgaaatgaagtatagttatcattaatgcccttattatttgaaaaatcacggtagtaatagtgattatatgacgaacttagtatagaatctttcatagaattgccattttcattgagtttagttgtcttgtcatttattggaactgcagacgattcagcatttgatactattcttgtaggatcctttggaaatttgccataatggtattttaattttttcttacccaatttataatctatatatttatccttccattcaggaattgcagattcagttaaatgatctgcaaacttcattctgatagtctatatccagccgatatagtatttttttcttttattttccttttttcgatcttttcgctgtttgttgtgcttactatttcttctaataaattaccaaaccccctttataaaagtagctagatacacaaatttattcattcatacatatatatgtggatatatgaatatgggtgtatatttatgtgtagatgtatataaatactgaaaagatgaaaaaaagctattaactttttgtttttttgtattttatgtatattagcttaacattatcttattagatctttaccacttatctatcatttttcatcttatattcactctccaactaactggctgattaaattaacacatgttgataccacgataatgagcgattgtcaactttagatcatttaacaattctttcaatttcccacatcatcgtcatctattattatgtctccatctcttcgttgttgctcgagaaaacaaccagctagaaaagaaaacaaaagaaaagcaaaaaaaaaaaagaaaaatactgttcacgtgggaaaaaaaggggagaatacccaaaaaaacaaaatgactttccctccataaattacaagaataaataaaaaaaaaatttaaaataaagaaatagatatataataataatatacaatatatatatgtgtcatgaaagcgctatatttctacgcatgtgtttaaatacacgtgtatccgtaggaattggtatcaaagagtttatataactgtatagctacacttttacaagaagtttctttaagatttgctaccattatccttggcgttgcaaagttaacaactttttgtaaggttacattttttcttgcaagcagttgtattgcacttttatcgtgggtgaagaggatagacacacccattctccttttctttttgcagcttcatgtttcaatcctcagagattctttcagagttccagactgtcgagacagatgcatcatcacccacacacccatttacacagttttttcttttcttgcagaattgtgtggtgtatggattgtttgttctctgcgcaaggagagggaaaagaaatcaaaaaaagaaaaagaaaacaattaggcaaaatattttgtttttttttcttttcctctggataagcagtcaagtaaggaaaagaaacaccgtaacgtatcgctctctctctctaagtggatatgctagtgtctgggtgtgtgtaagcatatgttatcacttgcgtagatgtgtgcttagattgtttaatggtttcaggcattgaatttctgatctgttcttctctcttggttgatgtttattcttttaactatactccacagttttccttttttaatacacttccctcattctagtattatcttcccatttacatcttttcttcttgtttactcttacatcatttacttagatgagctaacgattgtcaagaaggtttttcttcttctttttccttatttttttgttcctatcccacgtacgacttatgttttattattacgttaaaacaaaaaaaaaaagaactggattacaaggaaatattaatactagatcacttgaatatatacaccctatctctagctatatataaacttcataatctattatatcatcgtttcttatactattatcctctttttttttttttattttcccactcttagtttttcgaggataaatttaaatataacattattgcatatacctacccaaatagaagataataaaatcaaaagggaaataaagaaatatagatactgatatattgatattaccatggagaatcaacaagaaagaaaaagaataaatacagaaaatgataatataatacaccacatagaacccctccgaaaaaaatataaaaataacaaggacttaaagaaggatcaagacactaatacagctaatactagtgctattattactaatagtaatagcaacagtaatagcaataataaagttactaaatcatcaatacccaaatacaatttcaataagttttgttatagacatgatccagatatccaatccactttcacacataccgcatgtcacaaacaagacatgaaaagactcaaagacataaatgatcgtatatctcaactgccggcatctgaacagatagagattcatcacatcatatccaaattcaccaactctaatgataaaatacgaactctgattatagatgggatcctgaattcctgttgtttcccacaactttcgtatgcctcgacacagttgaaacaaatgattaaaatagactttataagtatattgccacaggagctatccttgaagattctaagttatctagattgtgaatctctctgtcaggctactatggtatgtaaacgttggaaagtgttggcagatgacgatagagtatggtatcgtatgtgtcaacagcatattgatcgtaaatgccctaattgtggatggggactaccgttactacatatgaagaatagagtcagaatgatccgtggtaagaaacgtgaaactgcacatggaaatggaaatggaaacgataagattgtctcacaagaatcaaatattctaaataaaatgaacccctggaagattatttacagagatagatttaaagtcgaatcgaattggagacatgggaaatgtataatcaaagaattcaaaggccatatggatgggatcctttctatgaaattcaactatagattactgtttactggatcctatgatagtacaatagctatatgggatatttttacagggaaattagtaaggcggttgactggtcaccaaagcggagtcaaaacattgttttttgatggatcaaagttaataaccgggtcattagataagactatacgggtatggaattatataaccggtgaatgtgtatctacctatcgtggccatacagatagtgtaatgtcggtggattcatttaagaagattattgtctcggggagtgcagataaaacagttagagtatggcatgttgaatcacgtacgtgctatactttaaggggtcatacggaatgggtcaattgtgtcaaattacatccgaaatcattttcatgttacagttgtagtgatgatactactatcagaatgtgggatatcagaacaaacacatgtttaaaagtgtttcgcggtcatgttggacaagtacaaaaagtaattccattaagaattgtggacattgaaaatttagtcacagacaatactccaagcaacaatatgggagatacaaatgaacaaggacaattaagtgaagaagaagagcaagacatggatggagaaaatgttaaattggatgaaaatataccgtatccaacacacttgttatcatgttcattggataatacaattaaactatgggatgttaaaacaggtaaatgtgtaaggacccagtttggtcatgttgagggggtgtgggacattgcagcagacacttttagaatcataagtggatcacatgatggtagtattaaggtatgggatttacaaagtggtaaatgtatgcatacctttcatggtaaaaatttacaaaagatagacaatgatgtaaatataacgccgagtacatcaaatgataacattcataatggaagcacgactaacaggactgcgccaattgcatgtgtagatattggagactccgaatttttcagtggagatgagattggctgtgttaagatgtataaatttgatttagaagatactaatatggaatattaaaaaaaacaaaaaagacaataaataaataaaaataagttagtatataactgaacaaataaagcattaacatagcattttagcacacaacacaaattgataataacagaaagagttttgctacatatcctttttgtttttttttacattctctatacataagcatataaatctttaataagacaataaagtaaaaagatacgggcatgaagatttaaaatagaactaatatatccctatacaataagggatatacaataattttattgtttgttttatgagtttgtctttcattataccaaaaaacgcatataacagtatttttttttcacttctttatatcttccccccttcatttttttcttttcttttctttttttttcttattaacagaggaaagaagacaattgaaaagaagtattatgcatgagttttttcctatataaaatggtatatgacgtcataagatgagatatggtaaaaacggtagtacttttctacggcaacagaaaagaagatacacacaagaaagtcattaattatttccaaaaataaatgcccttcattccaataaatccttggtattttatcctttttctattaatatctgttcacttttgtaacactgcatattgagtatttccaagataaaaagatggtgtttttttttttggtttcattatggaatagaattgttaattaaattgacaattcattgaatagcataactcaacccctatttatactgcatttagatggatcctagataaaacaaaaatataggctgattatacggatttgttgtagatgaaacagatatatccttttgtctttcttaattatgtttttctttcgagactctgtttgtgtcttctttgttcatatcatcattactgaaaaatatttattagtttatttattcattttagcttttttctttgataactattgctattacaaagtccaatgaaacaatgacagaaatggtgacagatatatatagataaactacattaactagcaatgaatacacacccacatgcaaacagtctttctttctctttcttttcgtgtatatatctttacaatatacacgaatttcttcaaataccacaagacacagacacagacacaatttcattatctagccagacgggtacacccatacaccccataaaagcaactccgttgaattgtgttttttgtatatttctattatcttgaatgtttccgtatctgtctagatctattattttctgaactatctttaccacaggcaagacaataaagaattctacgaaggaacgaaacaaaaaaataaataaaaaaaaagtgaaaggagactcaaaaaagcaattgttttttttttttttttttacatcttttcattctatttcaaggactcattccatatatagtgaactctccccccgcctctatttcccccctagagactgttttaaatatttatatataaatattatcataaggatgtggatgtatctttatatctatactattaattattcgcttgaatataccttttttgtctagacataccttttgtattccgcgatttcttattttcttttatcaagatccaacaactaccttttcataattagtctttattataaacaatattaataaaaactgcaattggaaacctcttttcttattattctcctttcttttattgtttcttttttgttttgttgctgataaaaaccaatgtacattaacacatctggcaaacttaataataatccctcgaatagctctagtaatattgacaaaaacaacagttgctacaatagaaatgacaacaatactgatttacccaaaaatatttcgatgcctgatggctctttgagtgtttccccaacttctgtgtctccaaccaggatatttcctaaagatgatttcatttttaaccataactcatctttttttaatacaaatgcagataaaaatggtttacaaacttcaccttctaaagacgttctatgttgcaataataccattagcaacaccaaaactgtttcaactattaaaatagaaacatataattgtagcaataagaacacctttcataggaataacagtatttcaagccttgggtttatcaatagaccaaaaagaatcaacgagtttagtcaaagatctaaggatgacgatctgataaaattaaacacagaaagaaatagatatatcccctcgcgttcaaaatcgttaccatttaattcattgaaattgaaaagtaacttaaaatcatcaaatggtgagaagggacgtccggttagatccaagagtgtccatttcgatgaattgttaccgattaaatatttccataaatacgaatgtcctacttgtgtatctaggcaaaacagtgattgtgaagtaatagaaaaaatcaattttgatattgtcaaacctctgcgcaggtatcagtcggatagtgacagcgatggtgatggcagtaatggaaataataacactgatactgctgttacatttattaaagaagatggtttatttgatatcaacttttctatattgagccaaacaagtaacaacagagatcttaaattaaatgtttatgctaatagtggaagtgactcgaatgttatgttacaaagtatcaaattagagaaaagaagaacttataacaattttttcgatttcttcatttggggtaaaatcagtgtcaagaatatcttttatgagaaatcgatttatattagatacacctttaatcactggaaaactttcaatgaaattaaagcacagtatgttcaagatatactactgaaatctaattttaaggattacgatacctttgaattttctttgtataatttaaaaaatctaatattaaatgaaaatagtaacagtccagttcttacttcgtcctcaaatgaggatagtaacattattgaaggcgatttagagttttgtattcattatgaaacagtggattctaatactaataaaatgctagacttttgggataataataatggcaagaattataaaatccatttggtgttacatactcaagataataataataataataataacaataaaaattcgtctatgaatgtatcaactactttacgttcaaacaaacccaaaaataaaaatgatgataatgatgatgatgggtactttgtgtttcaaacagacaaatactataatatagctaatgaattaggtggatttaacaaaaaaaataataaatttggggaatataagaattcttctattttcaacagtaatcgtacaaggactaattctactttcctagatgatttattaaatgaaactagttttcttcaactagatgattattctaatatagattccaccacacctacgagtaaactttacaatttcaataattataaaagtaataacctattattacaaaaaaataacacaaataaaatattcggtaatagtaatgatgaggattatgctgatgatgttgataaagatgatgatagaccattgttctttaaagatttcagaaacccatttgcaaactaaaaaaacattgtaatttactagattacttcttttgtttttctccactaacatgactgtttttttttattttatttttttttgatgtattccatataaaaatgttttccttttaatattcttccttctgttattgttcttttctgtacaaatattcatgcatatatcatatcatcattcttgctgctaaataattaagtaattaataaataacaaccttatctttaatctttatacatatcactttttacactcacttgttttaaaatgcacagttaccaatacaagaaataaaaaaaaggaaataggtataagaattagttatttaacttctagtattttgaattaaaaataaactattcttttgtccaactttcaatttaacaaattgcgttttgtatcataatatgtatactaaaattatgaaaacataatcctgttctccaattaatgcacattaaatagatctatataactttcaaatatatttcaataacaaaaaaaaaaaagaattatccacaaaatattcaaataagtgaatgtgatattctttttaagagttgcatcaaagttttctattctccaaaagtgaaacgagggagaaaatatagagttctaaaagacggtaaacttagaagtacaagtataattttactcttaaaatgtattgaaaattattcaccacaaagaactgaataaacattctattgatatctgtgttaaagcatacatatacattggtgcatccatatgtatgctttttttaatttcttttttctttatctcagagaaaaaataaaaatgtcagggaaatctcaatatactgcagaagagaataaaaggcgcaaaaaaaaactattgtgtttttttttcgtattgtttatatttattttagtattttttataaaaaaggaaaaagaaatttgaaatttgaaacaattaaaaaaaaatagcgctaattttctatcactttaaaacaaatgagaaattataggccaaaaatttctcatcgtcctttgtgtttctagttagcacaaaaaaaaaaaaggaaaactaattagtatgtaaaaaaagtaagttaaattaatatggaacgtaatatttctcattaatccttacaaatattattagatgttctaacaaaatataattattcgggttacttgactattacagtggtagaatcaaaaaaaaacaacataagatataaatgttcaatattcgtaatcagttgaatcttatcacattatacagatatgataagactataattaataactatatcagcgagttactaggctcatatgatgctactttgtaacatataactttacttattttagtatacactattcctttcctcattttaattacgcttcttataatggtaataatagggaaaagggtccttgaaagctcatctattttggtcatatataaaaaaataaaaaaaaaattatttctgacaatactagaaaaaatattatatccttgggtattgcttgtttaggagttgttaacggtttgacaataagagataatttatagatctattataagtgcctttaatggggagaaggatctctttcttttttatttttatctttttgcgaacacttatccctaaagaaagaaaacaaaaggaataagaacaatagaaaaacaatttacttatatgaaaatagtactggactacagggatttatttttccttttgcgtttttgtgtatttgtttatttatttatttcctttttattttaactagttatgctgaaaaaaaaagaaagaaaaaaaaaataacaaagatttatttcgcgtaagggttctttacatagttttttgttttttaatagatgttactgtttttctcttcctaaaataattagacaaaaaaaaagtcttttatcgtctattttttttgtcttcttgagaaagattttatgatatatttttaaatatttcaaagtaaaagcagttaggttttcaatacatcaaatgcttccttattacttaatttctccttatacattaggtctgaagtatattttagaaatttctcgaatatataatcaacatagaaattttgcaattcacgattaaagatggagttttctaattcagatggttcattgaagtatatctctttgaatccactaaattgttcaccagttgtgtctattgattaggtttgatatattttccttacaacactaacaaagattgttcgaaatttttcttggataaacctatctaatggaaaaaaaattaaaaaaaaaaaaaaaagaaagaaaaaacaaaaacaaaaacaaaaacaaaaacaaaaaaagaatatagtcataccacacgacacagtcccattatttcctaaaatggaaagcacttagctctggctttattgtttttttttgtctcttctatttttctctcaattattattattatgacaggacaagggacaaggagatagcggaaaaaaaaaattattgttttctactgaaatttatattgttatgctacatatatatccattgtatggaacagggaacaaaaaaaaaaactgaactagataaaaaaaataaaaaaaaaaaagaaaagcattttacatcggagatcatctatccataacaaagaaaaaaaaaaagagcaagtaacaatttttgtttttcttcaatgtttaccatagagtacatagtatatatatatatataaaggccctggacccttaaatgattgtttagcatcttttctgtaattttgccagctttagtagtttgttggtgttttcttatatatccttgagaagtccaccatagcataaagcttcaattaaccgtccaagatttccatcaaaatatcctcttccttatctcatcagttgattttggatatcattgaaacattctaaattggcgttaggatctaataaaattgcttacaatatatatatcataaattgtatcagattttcttaacatgttgttttcttctgatttaaatttattctttactattttcgtctgtctttcatgtctatatttctctgctcatagtatagctatgactcgctacaagaaatctgttccatttgaaatcaattaataaaatagtttggtttgaaatgtcaatttgttctatttatttggttttcctgagtcaagaaattgctttatttattttgtttattaatttttatggcataattagacaaattatggtttaacatgtatatgaatattcactacaaaaacatgaactattacaactaatattactacactttataataataataattaattgaattatgtgcttcaatgtgctttttttttttcttcttctgtttatttaatgttaaataaatatgggaaacagagaatttattctaaccgtttatgtttaaagtttgtctgtcttatatatattctgttttgatatatgatgtatctatatagtaattataataaattgaactaatgcgtatattaacaaaggttttttatggtttctcaagaaaaatactaagtattatgtgttttcatattaatgagtatcgcatgcatttttttaataaaagatataagaaaaaaagttctgctatgatatataaaagaaagatcatattacttatctgcgtatatgtacatatctactaactatgcttttttttattttattgccagacgttcttaaataattcattgtcatctaatgatacagttgaattattagtgttattgtaactattaacactagtagtgctgttaccactagtgttatttgttgacataatattattcgcttgaaatttagtatctcctaatgatggcatggtcattgaatgcataccactggttttctttggtttagaatataatgataaaatagatcgtttcaaatctggtctatcattttttgacatgatatttctattactattagtattactagagactatatttggttgcgattgtgtgccaatttgattcaattttaaatatgggtggtggagattattttgattaattaatgtcgattgagcactggtgtcttcttctacattacttttaatagaaccattattaatgctagaaacaaaggtagtggtatgttctgaatttaataaatcaatatttgatttctttcctgtatttttgtcgttatcactattattagtatctttcgtaactattttgtccaaaccacaccattttttatattcgtatttatttctgataaataaacttagcttgttcgtatccatcaacattttactcaatttgttttgcgattcagtatcatgactcaacttattctcatagtattcattagccagatcattattttgcatcttaattaacatagttaaatgttcttctttccaagtatctaaatccacagattttaccttcgatatatgagtacccaaagatctatgtattcctgcacatttaatacatataaacacacctaaggaccaggaggcccatcttggatgttgttgtgttttacaatctgcacatttagagtttcctggatcacgcaataatgcatttaatgcctttttaacctgtatagatgtcattatattcacacatatatcttgatgtatagatagtggatgaaaagttttgctacgctaataaaaatgtttactagtagtaaaaatagttaaagtgtactttcttcataattagttttgattttttttttctcctttcttgcttctttattttcctattctgatttaaatgtaatagtttgattttttttttttcttattactttttgctttttctttttgttctttataattcaaaagtgaaagaaatttgttataaaaagataaaagatgcccataggtatacatacttggctggttaatttgaggaattaaactgatttaactaatttgggaattatgcatcaatagatgaaaaaaaaaactatgtaaatgtacataagagtatatatataagaagagactgaaataagatgattaaaacacaaatatttggtcttgcatcttggacaccggaccacctttctggaaacctatggacattgcagtacgttttgtaaaagagatcatctttggcggaccacagattaataattgaactttatcctttggtccaggtggaggtagatgtgcttccatgatttcacgtgtcacgtatccaataccaccttcccaatcatctctatcagtctgttcaacgaggtaataaacatggaattgagttggtctcttggaaaccattaaatcaatttcattcttcaagaataaatctgcttcagtgcgactgccatatactaaatagatttgtgtcttatccttaacatcatcaaatatcgctctcatcacttgatatattggagtgattcctgtaccacctgcaaccatcccgatagcattccggcaattacgtgtgtagtcataaaacccttgtgggccggtaatattaatcctatcaccaatagataattcaccgaacatacgagaaacggtccctaactcataagacttaatcaaaagatcgaagtatcctggacaatcctcatccagtgagatcggggtataagctctaacaacctttttgaaaccatctggagactcgttatctggaacagtggtcttaacagagatatgttgtcctattggtaaacctagtacatcattttcttttggtaattcgaatctgtaaattgctgtgtctttagttaagacagttttggtgaccaatgggaatgatttatatacaccactggcttctaatactttattgtaatttttatgcttcatttcttttctatacaatggaatgaatgctaagatcaataacaaagaagtggaaattataccaacttcatagataccaatattcaatgccatttgagtattaatttgaaccagatatagttatatatattaccccagaatattatatgaaaaacagtaatttaaaggtgtgagggaaaatagcttaagcccatcagcgtttaaaaactttattcatataatatatccttattttttttcttttttgcttctttatttttgtgattcgattgtatcctcattgtaaatctaataattttattttgtttctatttcaagatttcgaaataactttaaaaacaacaaaaaaaacattcttttttttttttcgctcccgaagtttcctcaagatgattggaacaaaatcatcgagagagagagaaatgaagcatggaaagagttgaatggcattatatacaaataatattcaaagataacgatagaagaacaataagcaatatttagatgggcggtggtttatctttatatgaacctacatatatatatgtaaagagagtgtgggtgtgggtgtgggtgttttatcatgtacttattaaattgaatagaagagtatgaggaagatttacttacttataccattgtggtaatggaatagttaaatatgcattagtaccatagccatacaaattttggatctctaattttccaccaaacaatttcaaatataatttacaaagtggtaagccaaaacccattccagctatattattattagttggttgaatatcaccgaacagattagaatcctcttctgatatgtcacttttgttatcactactttttctcttccgtatatgtttgttatttaatgttgtataagagtagtcaaagatatgaggttcgatagatggtttgataccaccaccttggtcacttattttgacaattatttcgtttgagtaatctttcctttctttgtatatatttatattaatttgtgagtttagtggtccagataattttttcagttttatggaattctcgatcgatgctctaattgagtttttcaagatttctgtcataatatattcgaatattattggtaccatgggcactgtaatatctttatttttttggttcgtttcctctctttctgcattgatactagtgatagttaattctggcagtagagttggatcatattgtaaatggcacatatcgataacaaaatcgaaattatgtttgatcagtttattcacattgacttgcgaatccaggatacctacctgtttttgaaatccgtcgccagaaaggttattattattattttcttgttccatcaatctcaaataatgtgtggcaatcagtttcattttgatcctgatcaacagatgtttattcaagaactgtgtgatcagggattcataattgatattattattgaatttggagttatgctccaggacttcttgtaggcctgtgctcagggtgaggagtgtgtcttcatggtcgtttaagaactgttccatgatcattctcattttttcttggtcgtataagtcgtaggggtagttgaaggacaagagagattgcagagtctttagatacaaggagtgtgttaattcgatctttgggttcagtaggacgatataggggatcttttggatgagatccaattgctgacatgtcattactaatagcatgttcatgtattggatgttcattatatatttttggttgggagagaatttgttatttgttgctgggatatatttcattagaaagtcgtaatccaatcttggtaatggtctcttagacatatcttgtatcagggattcgatatttgatctaattctatagtatgattcaaatccaatccgtgagaggattgtgctactattagcattgccggtgttgttatatttcacagaagataatgaagataaacgattctttagtttgattatatgtaaacgtttaacattgtacaatataattgatgatggtaaaaacattttatctgagaatattctctttgtaatagacgacattgtacatacacaggcaggtgtttttttttttttgcttctcatagtcattagaacagatatatataccaataataataataataataataataataatagaaccaagatatcaatacaaacctatacatatccgtaacaatatatcatctactgtatcatcgttgcaggtttgtacacacccatgcaccacagaggtgagtattttgcgtggtgtcctgatgcaaaagagtttttcacctttcagcagaaaaaacggcctctcgtttctgagcagcagtcacgtgccccacaggcagttgtctcttctttttgaaaaagaaagaaagaaagaaaaaagtgtggtgtggtgtggtgtactgattttgatattcaatgaagaggcaaagcaaaagaaaataaaaaaaaggaaagggaaaaggagaaggaaaacgtttcttttgatttggtttggtttgttctctcctctctcctttttttattttccttttttttttttatcttcactatgcaaggctctcttgttcgattgaattgattgattctttgatcgatctgtcttagcttttacttctttctagtctgtgtatgtttgcctgcttcctttcttgtttccttactggacatatgtatgtgtatctttgtttgtttaaacaaggactaaaataaaataaaataaaaaccaaaattgaaattatatttaaattaaaattaaaattaaaactaagtaaaacaaataacaacaatctagaaaatgtcaaattttaactcattcgctagtagttggaccaagaaactagaagaaatttcctccacagtatctcaaaagacccaagaattgtcaaccaatctaccatcttttgcacaatccacccagagattggttcaagaaaagttcggtcaggtcaccgacatatcccaactaccacaggaatatctggaactagagaagaaaatcgatactctgaaattgattaacgaacatttcttaaagattacttccatctacgaaaacgaatcctatgattatcctaaattcatcaaggactcagtcaacgacttgtctaaaacaatctcctccaagatcgtcgacttgtctcacgcaacttctaccacggaggcccaaaacatcctcttgtctcctggtccagtcaaagacccaatgactttgaactatgctctaagcaaagttgccctcacctcaagcgagttgattaaccaatcctctgccaacctttccccacaggagactcaaacctcttccatcctattggatttctctaatttacagacccaaattgctcaagcaaggatacaacaggacacgctaatcaaaactaaattcaacaaaagattaagagaatccttgaaacaggatattgagagagcaaatagagcaagaaaggaggttaccaacaaaagattacaatacgatgtggcaagaactaaattgatgaatgctaaaccagaaaaggaagcttccctaagggtacagatggaatccttagaagaccaatttgctcaagtcaccgaacatgctactatcgtcatgcaagaagtgttggccaattcagagtttttatttgatttacaatctttggttaatgcacaattatcatatttcgaaatgtctactaacttattgaaaaactttgttaaaaatactaatttcccagaagtcaatccttcttctcattttcctccttcttcttcttcttcttcaaatgaaaatacaacggctactgaaactgctgaagctactgctgtcgacaccaatccaattgaattagatgataatgatgaagaattggataattagactataaaaaaaatcagatcatataaataaatatatatatatatatatatatcagcaagtaaatacgtagagataatttaatttagctacttaaatcttagtatctgtggctaacagagatcaataaatttgtgtaccttttttttttcttttatccttttctatatattttttctttttctttttcttttttgttttgtttttgtttttgtttttgttttattactactttaacttttatatatattacaaacatagacaggtgtataaaataggcaagagttgtttaaagaaacaaacaaaacaagagtatatatatgtatatatttatatatttatatttatatatttatatacatatttgtttatttctttatttcagttatggatttcaatgaacaggtattagaaagagatgcacaacgttatgtcgtgttggtcttaaattttttcatcacatttttacaaactttgatacctctagtgataaaatttagttccagttacccaaggttgttcttatattcgactatagtggtcatgctatacataacttggtcctttttgacaaatttggctaaactgattaaaaggttgttttatctatacataattctgtttgtcatcaccattcatcttcgtggatgggaacaattttttatttatgatctaccattggtctatagtcaatgcagggacggactttacttgttttcacaatcggatgaatataacttattgaaatctcatactcagtatttgggcaagcagatttataatcgtttattccaataaataattcaaaaactcatacgaatgtgcaaatatatatatgtatacataaatatatgtacagatgcatagaatgtattaaaacgtttctcttccttctctttcttctctttttttgttttatggtttattttgttaattctaataacgtagtgacactcgttgagatcaaatcaatcgaccgataagttgctttagtttttttttttttttcattttttatctttttctctcttttctcctttccccaccttcccttcctcttcgcctttccccaccttcccttcctcttcgcttaatttgcatctttccacttctttgatataaaccatactatgaagttaaaaaaatcgacaatctttataacttgatctttaatgaatacaattatacatgtatgtatatataatatgtatatgcatatgtgtgtgtgttctcggtttttttctttttttctttttttgggtggagaggtttactcaatctactcaagtaggagacagtaatacactctaaatttaacgtttgctttgcatgctatgatgaaactttgggttaaaaaattggctgtattggcgacgattttggcaatcttaagtaatattttcattttcacatatccttctatacatccaacaagttgttcctggaaatgtcccaacaacccaagcgatacccacagtggaccaaatcttgctgtcaatgaattatctctatgggataaatccatcttttattttagaagatacatcaatgatattttggaacaattcagtaattccaatgctacagatactaatggttcaaataatagtgatcaaatccatcttctagcgtttggtgatccacagataaaaggcatttggaaaaatactccatacagaacaagattagatatctttggtaacgatttctatttaggccatatctattcgatgatgcagaaaagattgaatccaagtcatgttgcagtattaggtgatcttttttcatcccaatggatccctgatgacgaattttttaataggaccagaagatatatgactagaatatttaataggaattccccaaatttaacagagattcaatctcagaaccacgacaacatcggtttatatcaggctaattggaagctttggggggatcagtttgaattgttaaataagacccaaaattttgaattcggttacaatgatgtttattcatgggaccccgaaaacgaagattttttgtttattaatgttactggaaaccatgatacaggttattcaggtgatgtcacataccaacatttgactaggtttcaacaattctttggtaaagataactattggattgaatacaataataatgagaaaaacaatgaaaagacatggagactagttgtgttgaatgatttgcttcttgaaggaccagctttacaatcagagtttgttgattacacatgggaattcctttatcagttatttgaaagaaaatttaatggcagcactgtcctattaacacacattccattttacaaaaaggaaggattatgttacgatggtccagagtttagatactatccaaatggattcgaaagagaaccttataaatctggattgttaagatctcaaaatcacatcagtgaagaaactacaaatagagtattaaatttgatttttaacagtgataaaccaggaattatcctagtaggtcatgatcacgttggttgtgaagttacatataacaaaaattcaagcactggtaagtgggttgctacaaaataccccctttcttctgatgaatcctttaattatcatgttaaagaagttacagtaaggtccatgatgggtgaatttgatggtaatactgggttattaactggtcaatttaattatgtaaagaaacaatgggaatggacattttctttgtgtccctttgctgttcaacatttttggtggtgttcaaaagtatctgcacttttagctggatttttatggtctttgtatttagtattataaaagaatctattagcataatgtttctattctcaaaaattaatttgaatatcactatagaacgtacatacatatatttacctatatcttctattaacattaatatatatgtgtttttcgtggaattaacagatatttttacggttgttgaaaaggaaaggtaatgatggtgattcatgattactatatattaaataaatcaatatataacagcaaataaaaaaaatgacaaataaataaaacataaaaagatttatatctaataataataataataataatataaaacattaaatgaaacaattattcatactaatcaacgtgtatttcattattagtgataacgtctttttcttttcttttttttaagggagggggattacattacattgaaatagtataacaaaagcacaaaaagtgacattaacctttaaaagttacaacataatatttcaggcatccagtgtgactctcccctgttttagttgttgaagtagttgttgtccatgacttaaagtatttggagatgcagaacttatggatgatgtattagaactagatgattttgtagagatattgttatgagtgttatcaatggactcgtcattatgtttattgttatcattgatattattactatctattttggtttttaaatcttcagacgttaaaccattcaattgtgatgtttcatactttttagtttctgggtatttcaaatttgcataatctaatctaaaattgattttatcaattactgaccaatcagtcaatttgaaaatcttataatcggcaatttcaaatagtttactttgcaattttatatcactttgtctcaaaaaccacatggtttcatcattcccaattttccagttcttttctcgaagtaactcaaatgcaatatttttttcaactggtaaaatagaaaagtaataatggtaaaataatgtaaacatttccagtcctctaaatttatctaatattttatcaaattctgtttcatcttttatactcgcacgaataacatcccattgttgtgcagatctaaatgcatctaagggatttggtgggttaacacctaatggaatgtcataaaatctaggtattctgcacacgtcaatactatgtctgtaaccaccaagctttccatcattaggaaacaatttattcttagtgatttcgtattccattataatttcattaataccattgggtagcgtcaataaaccacaatcgttactaaaactattggacaattgtatacgtttattttcttttgcttgtatttcatccaaagtttcaggtaaacacagaggttcctgtaataattcatcatcatcatttatgaagtcgtagaatgaatcagtgtcagattcagtttcagaaacttctttctttgtaactaaatcagtctcatcagatttcttttcttttgatatcttgtcattatttgtattaatagcatattgttcactgttagcaaggttatcactctgacttacggtttctaccttggatttatttatttgatcaagggttgcggactgacctttttggaactgctgattggtttgattcacagttgtagcccctaaagtaggtatagtggcagtggaactagttgatgatgtcttcagaacagatttatttgtatttatggatgtcaatgattctaattgcccaattttatttaatggaacgtttgtagtgacacttttattatgtattgatacaggagttcccactcttggtgttgtactacctagtggaagttgagtggattcatttaatttgattttattctgctgtgaagatgatactaatgattgcttaattgtgttcttttgcttttcatcatccttctttaaactttgcgcagctgcggtagaccatttcatgtctcctactggttttgctggaattgtggcaggttttaagatagtggatccagtaacaccatttgccccttggtgaatatgtgtgtgcactgcattgatagaagtatcatttgatgtgttattatcattcattgtgttcgggcttttatttgttgttttttttgttaacggtgacgatgtagctaaaatagacgtgttattaatactggtagatatgctaatcttctcatcactaccattagttttgcttgctttttgagttggagtagtatctcgtatatcttcatgtggtacaggatttggtgattttgtgctcatctttaccgtaagagtcggaccttgcgataaagattctgctgctgcatttttggcggccaatttagcagctttcttggcttctctttccagttttctaagctccttctttgataacttagacgtatctattagtttactactattctcactattatttatagcggtgctactaccactactaccagaaataccattagcagtaccatcataggctcttttattatcttctgatagttggtttgaaaaatactgagacacttcatgagcaatggcctcatttgattgtaaatcaaggtcatcatatattgtttcatcttctataaaaccatcatcttgattattttctacaaaataattaatatcatcttttatgttaataacttgttgcgggcttaattcttcgttggcaacaagacgtaatgccaattccatttgttgttgatgccatctgtaccttagttgtaaatctttgagattttgaatcttttcttcattaagttgagaaaatgttttctttttcttattcaacgcttgtaatctatcaatttctacatcaagcagttcatattgtctatctaattcgtcaattgatcgtgaaagataattttcagtctccagcctttcctttgattcagggtccaaagtttctgctcttttcagactaatatttgagtatgctttctcctttgatgccttttcaacagctttatatttttccatggctatttctactcgtcttctgtgttccagtagagtatccttatctttaatatcaggcgaactttgccatgatttgatttgttctcttaatctttgcaatttcttgacttctcttttcaaatcagattctaatttgtccttctgggaaggattatttgtacaactttcatgtctttcataatatgtgtcaaatacatccagaccttcattaatttttttaaaaactttgtctacttcttgttgtaattttctatgtgccatgacttatagtttacagaaattatctttccacttaaattgatttaatttattccgaaataaataaataaaaagctgttaataaatagattagaggataatatatatatatgtatatgtatattccacttggtggttaaaaaggagttttaacagctttcaattcgttgatatattctagtagatatgaggaaattctttttctatcatatacactcctatactatgtcttctttaatcacttgaaatgttaactcaattagctattgacaaaaattagatatttcaagttttaaaggtgtgtagataatttcgtttagatagtatgtatgtggttagcgttaaatgtattttaatgcttttagaatattttacaaagttctatcttctggttctaatctttcttctttcttcgccatcatcatctttcatcgtttctcttagtgaaatttttttgttatctttttttttctcgtattttgctttgctagtctcagggtatgtatgggtgttacgaagaagggagagaaggaaacaaaaaaaaaaaagaaacgtggagttggcggatttaaagcggactttacgagggtgtgtgggtgtacataggtttgtcggattttggatatcgcccagaaacccggatattccgcatcgaaatccgcaagatattccgtcattcctgcactctgatcttcttcaagagaattctaacgaaaaagtttcgaagtaaattttttcttagtctatttttcctccattaaaaattacaaatagaatgccatgaacaaaaagaaataaaaaaaaaaaaaaaaaagaaagaaagaaaaaagaaaagaaaaagtcatcgagcaatttttattttgtagatgtgagaattaaaagttagaaagcgttttcttgctttagttgatgtcaaagttattcaatattaatagataaatgtacttaaagaggaacaaaaaattaaataaaaaaacagttacttctattataatattttgaagcaagaaaagattcaatttactgagaattttattatatattttgagtgtgaggaagggagggtataattaaacgaagatcattaaaaaacatatatcaaaaatctatatttatttaaattaatatagataccgatatattatcaagttagcatataatagtgtgataatatatatatatatatatatatatatatattaggacccttttttatattttatcttattttatttttgattgcggtttttatatttattgatctctattgggttctgtcatattatttatatcctatattgaaatattatttttcatatcattaatttattatttcttttattattattgagattttgataactactcccagaaagataatgttgtctgttgagcaaagatataatatttgtcttatggccgaaagacatccaaaatggactcaattagaattggctcaatgggcatatgaagctttccagttatctaatattccgtctcaaggtactatctcaaggttactggctaaaaagttgacttatatgaatgctaaagaacacgaaaaggatgcaaatcgattaagaaaacccaataatgtattagtacgtcgtattttacaagaatggatctctcaaagtatatggaatggtatacctatcacttctcctattattcaagacactgcccaagcagtgtggcatcgtattcctgcaaaccaaagagaaggcaatggttccttctcttataaatggatttccaattttctttcaaggatggattttaatatctctgatttagatgaagaattgccaaagacccccaagatttggacttttgaagaaagggagcaactgaaacaattattttctaacgttagaccaaaggatcttttcactttagatgaaacttttttagcatacaatctaccgttagattatgcacaatatgaaatgtcgcatattcaaagaagaatagaagtggctacagtaatgctctgttctaatctagacggatctgaaaaattgaaacctttagtcgttggcaaatataattcgtatagaagttttagaaactacttccccgatgatccaagtaaccctgtacaattgtcccaattaggtgaaaagatggcaaataaatttgaaatatcttatcacagtaatagaaaagcttggctgacaagtaatctgttttataattggctggccagatgggataaaagactggtggcagataacagaaagatttatgtggtacttgatgattcatgttctcataggattgttaatttaaacttgaaaaatattacattattttatacttcatcaaattcaagatttttaccattcaattggggtgtactagatgaatttaagacaaggtacagaatacaacaatatcaggcgttgattgagttacaaagaaaaattgaaaataaacttggtaggaaatattatattagttttgagcaaagtcaattgacgatgtcaaatgcatttaagtttatcaaaagagcttgggattctattcctgctaatgcaataaaggcgaactggaaaagttcgggtttagttccacccgaaatgcttcccttaacacaacatatatctatggctttcaggaaaaacgaaatcttggaagcacatttaaatgctttgtgtcgagaatatcattgtcaaaaacaatgggagtatgatatgttattagatttaaatatagaaaataagaatacaaatttcttaagtacagaggaacttgtagaaagtgccatagtcgatgaactggaacctgaaaatgaatattattcagaaagcgctctttcgagtacatctacatctcagattggtatagatgaactaattaacagaatacctggaaatatggtaggagattataaagatggaattgtcaatgaattaaccaacataccaccattgcatagtgaccatcaacttcagcaaagttcaatgaatgctacagcaaaaaattcaaatatggatcattttactagagatccaagtcaattatatctgttggctactcctcgtgttgattcaggaattcagtctgatacaagcaggtatctgttagggagggataacagtactatagaccaaaatacagttactaattctgttgataatggtttggataataatataaatggatattttgcaggattaaatcaaggcatcaataatagtcgtagcgataataacagtaataatctttttaatgtcagtactttaattgataaaccaagtttgttctttaatggtaacctagacttagacttacaagatctgggtgttgatattgctggggctgactatttcgatgagcttttttctacttcatttgatgtaataaacaataatggaagtaatactcaaagtaatgtaacacttccaaactctacagaagcagtgaatgaggctacattaccatgtaatataagaaatggtacacctccgccacctactatctcaaacttgtattctaatccaaatataggtatggaaaaagcgcatgtcaagaataatcatcaaaatttattaaataatattcaatctcataataataatattttatcacaaggaaattcaaatttcgaacaaaatggtttgaataatttaatctcaaatagatcaaatactgacatacctttaacttttcctagttttaatcatatgtctaatcattttcaaaatcataatttttctccagatatgttgcaaaccaacattgatattgctaaatcacttggtaatattataaaacactcagaaaataatgaaatatctctttcaagaagtaccatgaatgaaattcgttctaactatatgaccttattgaaaatgattaaaagaaccagacaacaactatataagtctaaactaagaacaaggcaaaatcacctcgacaatgttttgtctgctacaactgaggtttcgaatcttttaccaaccaatgaaaatgataaagtatcattagataataatttgagaaatactactccatttttttagtcattataaatttcatattattatatatattgcatatgtattaaatactttacttaatacaaaattattttttgtcatttcacaatcatttaatatgtatttccatctatagtttttgtttttattcaactatacgtatcagaatcaattggtctttattaggtgaagtatgtagaaaaacactttttatttcttctaatttaagataagactctattacaggtgaatattgtggaaagtaactgtaatataatatatttatatggtagtttaatgtgtggaactaattttgtaatatatatattatatatataaagaattataatgctttctttcaaataatagatcattaatcttcctcaacatcaaaatatttaccctttgcacttaacttcaaatattctttagcagcatgtaaagaatcatcagttacaagttggagtatattgtgaataacttctaaactcaatgctttactattcaaagttccatcaattgctattttgatatctgatatgcataaagtatcagcaatacctgttattacactattgtatcttctacccaaaatatcaggatattttaataataattggatatattcaggtttgtcaatggtataagtgatcataaagtcccataattcttcgtctttccaactgataacatagtcaatagccatttgtggatcatttaactcatctacaataattttaagtgcttttttcgcctctccaattctcccccataagtatattaattcattgtataatccttcagtagatttgcaaagctcaattgctttatttatatcataatgtcttctttctttcaaaaatggaagtaattttgttttgtcgcaagctatatataagtcaattatttcattttcatgagagctcataattcgagaatctttctctaataaagtttccatcacaattaaaagtactttattcagattagcagtattttggtttttaaacattgatattatatcgtctaatgggatatattttgaggcaactacagctaattcaattgatttttggaatattctttgaattgtgtctctagtcaaagatgagatattggaaggatcttcatcataaaccagtaaaactatatctataaatgaaccaataaactcgggaattaattgtggatgttctaataacaaatcaattgttcttttgtctttctgtaaaagcatgtgtttaatagcttttgaatatttctttgttatcacatacagataaataagttgatctctataagccttgacttctgtgttatttaaagattcctttattaatttttctaatttctcttctaaagcattgcatgaaaatatcttaatatcccaattatgaagtaatcttgaaaattcctcaaaatttttcttggataataaataatctaaaatggtatcaaatattaaaggatcgaaattatagtcttgtggaatattatcaattagatcagagctaatctcttgtgagtttaatgccttaaatattaatgtttgccattgttctttgataaactctttgtgcaatgcattatctctattggtatttttactaatatttttttctgctgtcataaaaattttgaacatattcgatcctaaagtatcccatttatttaattgaatttcttgaagcaaataatttataccgatatctagtctatccttgaaacttatggtggggatatattgtgcaatatcccacgcctttaacaattcattatgttttagaaaccattcaaaatgatccattaaagatagttcctgaatacagatgcaatcagtggtacttatcagataatatttgggagttgaatcattggatatgaaactagttaaaatataatcattaattgataatttttcataatttttaacaattacttcgtcattattgatctcttcgcttgatattatatcaaagatacgtaattcagggataccagattttaactgtaattcatggttattatccttccatttatcatagcctaaacagataatttgatcgtctttaaaggagcaaataccggcaattatcatttctacagtgaaataatgttctaattcaacttgacaatctggaacccctctaagactagatgcagcacttgagagtattgaacctatatgagtaaaatcctgatttgacttttgattaagtgacacttttagtgaccaaacattacagccccaaccgattataattctgtcactttccgggaagtcaacatgaggtataaatagatcaggtcttgaaatatcattgttccaatcattattacttttgtttacagactgcggataccctatattcaataatttggatttggtaatactatcaacaaatgaaataccatcgtcattaaaccaaaaaataatattacctaatttgtatatacccaagatagaacctttaccttttgataatgttatatcggatctattacctaaccaattcctttgtgaaagaatgacttcaccagccataccaccagatataaatttttgattggatttgtaatcattatctaatatgattgaatggacaggtcttttaaaatcaaaggcagtcaattgtgatggattatccaaagaacctattattacggttccatccattgaagcagtagcaaaattgatattatcacaatatatggatagaattgaagatctgtgacatttcaatgtttgaattgatttaaaatcagtagttgttatatgcaatataccagaatgggtaccaaagagaaacacagtgtctgtaaatttacaagaagatacactatctctagcaaagaaacttttcggcaattttgaagtaatacgagtatatttcaacgtcggtgggtattcttcttcttctgaattttctgaatcctctgaatcttcttctgtgtctctggacttatcactatctatgtttatttcatttgtttcagtgaatatttgacgattctcactttctttcttattaatgtctgcactgtaactatttattgcaatatctgtatttatctcgttgaatttgtgactttctaatgcgttattcaatgatacttttaaactagagtccttagaagttattttttcgtccaaattagtaactaaattgttttctgtcatctatcaactcattcagaaatacatatatggttataataatatgatcttttgagagcaatgggtaataaaaaggtaaaacactaccgataatcaagcattattatcaaatccacattcacatattatacaaggttatttaacatagtttacactaactgttgcagttggagattattatagtatgagagatttttagggtttttaacgcatatggttgattagggtttcccgtcactccaaaagaggaaatttgctaaatgcataaaatatccaatccaaagtaccttttcatatccaaatatctaaggaaatagatggatatacgtgtagcggtgactgtgttacgaagattgtgggagactaaccattttaaaactgttctggaggttaatgtcaatatccatgtattggttcaattacaagtgtagatattgaggtgacatttaatgagcgagtgtgtgtgaatataaaatagatgataaattgtgtatagaagattagagaaagaaagaaagaaatagacaaggatagaataaaacatggcaagagctagaagaggtattttacttcagtgtgatccatcaataaaggcacttattgtacagattgactttgagagacacgatattatactagaagagttggatgatactcatctactggttgatccatcaaaagtagaattcgttaagtctgaattaaatcgtttattatcaaagaatatatataatccgatggaggaagaagaaaatatgtaatatttacaatggatatatgtacatatatatatatataaaggggaatagaataaaggtagttaataaataattaatatgcgtaggatttgttttgtttgtttgtttttaaatttatattttaatatagtaaggcattgtcaatacatagttaatcatttacttatctgatttcttaactcttttctaactttctccttctctgcttcaagatcgatattgaattcttctactaaccgtttctctaattttaaacgtttttctagtttttcttttttcattctagctaactcagctttaatttcatatggttcttttggtattttgtttaaactctctggatctggccaaaacccaggaacatttaatttacgatcagtatctgtaccaatatagtacatcacagcaattggagctaatagacaaaaagaaaatctgaatacttccaactgtgctcttgtgtatttaaatggtaatctaaatctcatttttggttgttatctgttgttgctttcactgaaaaaaataaatgatttatctattagttctattgactttatctctttcgtgtgtaattgcacctactaaaacaagactattttttttttgtttttagatattctcttgatatactaaggattcaatggttaatattatgtcaaaattatctaaagtagttatggtactggctatggtttacattcacatgtatatatatgtacatacatatatttgtatgtttgaagggggatagcgttttcaattttataataaaagaaggaaaagaaaaggaaaattgacggatattaccggaatttccattacaagaaaaaaacagaaaggaaaaattaaaagaagttactgaaaaaaataacaacacaggattatgtgaaatgaatagagtagggccgttaggtagagaatatggctataatattattactttatattatcatttgtgaggtagtttaaggcgtaacaaagagtttactatcctttatagaatatgaattatattattatcattgctagtagaagacagacaaatatatatatatctgcatgtagattagtttaggaggtgtttttatgtgattgaaaaaaaaagcaaaaaagttatatttaatgtataaatagtattcaatttatttaacttataaattttaaataaccataagtatctctcctcattgagctattaatttttttatttattactatcattacttgttagttatattttttctctttgaaattgttacttagttcaatattagagttatatattttactgggaagaaggcaaaagtatgaacaattataatgatttactgaacatatcagaattgtttgataagctgattacattcaataagggtataaataaatatgtgttggatgaaaccatatcctcgtttttgtattatcttttcccaagagatctttttattagagccttgtctcttctagagtctaatgatatgtttatatatgtattggagaaagatatcaggggagaaaataagagtcttacttgtacagacaataataataatgataataatgataacgatatccaaaataaattaattgaaaatttttatagacattctttgcatgaattaagcttcttattcagattaatagttaaaaatcaaattgaatttatacatgataataatacaaataagaaaagcaacagtattaataataataataataataataatacgcatgaatctttgatatatgtagatattttacattggtcatgttcttgtgacgaatattcttcagaacttttaaaacagatggactacaaggaaaacttcgaggaagaggacgacgtggatatagttccaagtagcataaaggattatctattaattgaaatagatgatttagaaaaattttcaacagacagattttgtcaattggattcattcagtctttcgaagcaaagatattttaaatataataaagtgatgtgtcctcatttattagcatatgccattctattaacatccaatgaaaatgtcttaaaatttttcattcaacaagaaaggaccgtatatttattatccattaataatattaatgaatggctaaaattgcatattaatataattatatagtaaaacaatatagtttctttaaaagaatataaggtattataaattaattgattgattaattattaataaaaatataaacaataaacaaagttgtttaataatatatattattaaaaaaaaaagaaagtattgaaactataaaatagttagaattataaaatagtaaagcataactaaatagaaaaaagcgatagtaaaaaaataaaaaaaaagtgacaggaacaaaagacgttaatttaaagataaattaacgaatataaaaaaattaatgtattaattaatatagtttcaaatttataataacataataccagcaacaaccatacccattaaagatggtgttaatccaatggcaccatttggagcaacttctactgttggttttgtaacgccagacttagtgctggtacttaaagtgacagttgctttggtatgagtaattgtattgcaagtagtacaagatggtttagatggagtgtgggttacacctgggacctcagttgttgggcaaagagtttcacaggtagtttctgtcttacccttggtttcagtggtaacatgaagtggaatagtcttggttaaagtacaagggcaatcggtgatagtaattgtagttggtttgtcgacagtgattgtcttaccattggtgataatggtggttggttctggacagtatgtggtaaaagcagtaacaacttcagtagtagtagtaatgtggattggaatggttctagttaaaatacaaggacaatctgtgatggtaattgtggttgcttcactgacagtgattgttacaccattggtgataatggtggttggttctggacagtatgtggtaaaagcagtgacaatttcagtctcagtggtgtattcggtcaaagttctattgtgtactggatagatataggttataggggtggtgattgatacaataggtgttgttccatttggataggagcaaataaaatcagaagatacacctggtgtattacaaaccgaatcaatataggaggctggagtagagatgcctggacaaacagatgcacctggagtatcacaaatagtactattattggaaactggagtagtgatgtttggaccagtggagatgactggggcagagatgactggggcagaaacaattacactagaagagatgactggggcagaaatgattgggctagaagagatgactggagcagaaatgattgggctagaagagatgactggagcagaaatgattgggctagaagagatgactggagaagacacaattgcatcagaagagacatttgcatagacagcagctgaagaacgaacaatatttggttggtcatacaaattttgtgctgatgcaaaagtagctagtgaagtagttaaaaatactttattaaacttcatgactgtgaatctaaattattctgttttgtattttgttctgtatttttttattattgtttttttttttggaaaatacaatcaaataaatattcctgttttttcttgtattgagtatatagaaaggtgaaacgagtgtttagttgatggtgtattgctcttttctgatattaaaaagggatagatgtgaggagtaaattctagaggatcatagttatccttgaatattataactaaaattaatgtactttatatatgtttatattttcttaaacagaagagatctctcctcataataattgcaatatttcctttagaagtgtttactattcttcgttgttctaaatttggttgcaataatttaaatctaataatgacaatagcaacagtcataacagtcataatagttacaacaatagtagtaacagtaataataaatatttaaatattagaaatagaaacttctatatatagtttggatgacgtaataggagctgtcaaaaaataatgtcaagccatattttctccgctgattgttatttttaaatttttgttaattgcagtattaacaatagaaaaagtttgcaaccgttgtgaagaggagaggcttgagccgggaaaaaacagaaaaagaacaaaagaaaaacaaaagaagaacaaaagaagtagtcttcattgaacaatatgtttgttaataaaattgatgtatgttgtgccaaatcttttgtttgcaaaactcaacaaggtcaaatattaattacttcaaaatggagtttgaatcttttttttttgtcttgtaaaagcatagaaacatcgcttctctcgaaggtcaaaggtccaggagcattccattttttcccctcctttccccctctcccccctttttttgattattatttttatttttattttcaactccactttagtaagagagaagtgcaagttcaagagactgagtcaagaaacaggtatttctgtcttctttttctttttctatttttttgttttgttttgtttttgcctggcaatacagtaacagtttaatacaacatcatgattgtaacggtaatgggaataataatactaactgcaataagaacacttttctaatgataaactgaaacaaaggatctaaattctttttattttttttactcaaaatatagaatatttaacaagaaaaagtacataatacttcaaatagcttaggtttctttcttttacagagggggattttgtttattattgaagcctatatttgagtgtacataggcacagtaaccttttattgtttacaaaagaagaaaaattcggatattgtggagaagggtctaaatttgttgttgttgtttttttttctttttttctttgttgtaaaagtgtcaaatttatttttccttctttccttcttccacttctacagatttgttttccaaaaagagtaaattcaaaataagaatagtttttaacaccaaaaatagaaaataaaaaataaaagatacatacatctctatttatttcatttttctaactaatgtaatacattatgtagaacatatgtgtttgtctttaaattacataagccccttaatattatttgtgttttgttttgtcattaacacgtcttttttttttgttctgtagcagcaataacaaaaaaatcaaggactactgtaaccttttaaaaaacaaaaaattgaatatatgattactaataatatcatgattattattcttattattcttattattctgcaaaaataaaaagaagcaaatttcataaccattaaaacaaaagtataattaaataataatatgggtgacaaatgtgttcttctatgtcatcgtaagggagagaatattatggaagtgctagaatgtctcagtatttgtgtagtaaccataaaagtctatattgaaaggggaacaagaattatttgcaaccttcattgttatatatgttgtgtatagcaattctgtgaagaaaaaatagtattcatagaagattcttgttaggatttatggcactttcaataatcaacaacaaagtggaagaaagttgagatccacaacaacaattaatattacacagtatcaaacctccatatttctttctgtagaaatattcctttttttttccttctctctctttgttcccgctctcccccttatctctcttcaaaattattttgataagaaaaacagcaacaacaatatcctttgatgaaatttacctttgcccttttatgaatttaaacgtgatagttataattctactagggaaatcttatccctggctatcatatattgtttcctctaattcaggaatatttaaagattccattgtaatctttgtcgctgttgttacttgtgataatcttttgttaatcatttgacgtttgtttgggtaatcactattattattattattattactattattactattactggcagtagaatttgataccattagaaactttttttgctcgtttgagtaataaaatttaataggtccgttttcgatatcttcatttaattgagactcacttaaagtcgaatggaaaatgtttgaatttgttggcaatgaggaaaaagaagaagaggaaatagtggaggttgaagaagttaatgatatacctctgaatgaagtggactgagttttatatctcttcttgttttgatcagtatttgtgcttattatagcagttatacatctactaggtctgtctttaatattctttttatttaatacatcttgaaaattatcgttttcaactgtccaattccaatataatccaattctagctttaaaatatatttcccaactattatctttgttacccattgcacagtttgcaattaacgaactcttcaggctttgtacatttttacgttttaataagctttgcttatctgatacaaaaaaattgtttccattacttaatatatctaaattatcctcgttatatataccactgtatatttcattattttcccattgatatgatgtgttcatgcaatcatctattaatactattatagaattgtttaaatgagcatatttggttaatagggttaatatcactatcagtcttttacatttgatatcgtgtaattgtctttgatcaacaccatgatttaaaattatgtttaagtggttcactaacaactgagaaaatccatcaattatgataagtgaatattttaaattgttctcattatttaacagtttttgtaaataaaatataagttcactcaattttcgtatcctgacatggaaaatatttccacacacatcatcttcaccatcagtagcagatatccattgttggtctctcatattgactgtcttattcgtatctatccataatatattttcatccttttgattttttaacatattattcactaggcttttacctaattgggtttttcctattcctgggactccaaatatttcatagatggaccttctgtaaaatccattatctaaggctttatctaatgatggtataccactagttaagggacgtgcattggaactaatcagttgggataatggtatacctaatgacattcctcttatctacatatatcctttgtataagctggttttgcttttccttccttcctttctttctttcttctagcttgtaatttttgtgttctactgttaatatttgtttcagtttctacattgtttctttcttggcctttgtctatgtatgtgtgtgttcctctctttcaatttttgttttctgatgccttattttttttttgttctaattttttttcaataatctaaggtatcgttatgaacatataacataacatgaagaccaacactgaattaatcatggatatatattcatcatttacttatttatgattataatcgtatacctatatacatgtggtgacatacatatgtgtatgtacataatatacttatacatctcctttaaatactttaatgtcaggtgccgacataaattatgttattataagtataactttactgttaggttctttacacctcaaaggcccttttttatgtagaaactttggttacactattggctgaagcaactctcttcaatgtatatttcttagtagcaagttgtgatttcttactactttcactatccttcacatgacctctagaatcgagttccacagtaccagcactctggaataatgatattttgcctactaacagagctaaagtttcaataacttggcttggatcagtcaaatgtgctttagcaacagtttgttttgaagcagaaccaacagtcactggatatataccataatgacccaatttatttttaccatccgggaatttagtctcccatgtggcttcaatagcattcaattctctaaacatatcttcatctgtgaaatcatcacccagacaaagaatgaaatcaggcatgtcatctcttgagatattttcgttgaccggatttaataaatcttgtggagatccatgtttgtgccagaccaatctcttaacgatttcacctttgttaacaaatctaggtctaacctccacatttgctttaccatccatgacctccaaatcgtagtcattagtgaatgctaataacattttctttaattttgaagcattatattcaccttgctcagggacagcacgcctataatgccaagttaaggcgactttcttttttttcaataaaggagccaggtgtcttggtggtgatttcttccatacatttagtgactcgttcttgccatgacatatcaactttttctgttaaattgacccagtcttcactgttaacatctttgataaaacatccatgttctgcagataaaccaacatttttatttttggacccccaccatttattaaggaattgttgatcgcggcccgatataatccaaatttggttttttggatcctctgctaatttctccataatattgtataattttgcagtggggatagcagcagctggatcttttactataggcgttaaagtaccatcataatcaaacaagaatagacggcgttgggcttctttatagttttgtaaaaggacaggacggttcaaagcaggagtaattttacgatcactattgttggtatttaatgctaataaagattttaagaataaatcggtccatgattggatagtagggacttcaggggataacttagcttgtaagttctctttaacatctcttggcatctttagagccatattgattgatttagctactgctacagaatcccatggatttacaatgattgcgtctttcaaaagggtggcagaaccagaaaattcacttagaatcaaaggacttccataacacttatgattagacatttgtttattagacttaatcgtcacatattctaaggcagttgtattcatcccatctcttacacttgtaataacacataaatctgccactcttaataaagataaatagacatcctttgggattctcatataataatgttgtacaggagagaaatccaaactaccatattcggaattgatagaattgactaaatcattaacttgttgttccagtctgatggtctgtggagaatctttatttgttgttggcgaggatacttgaatcaatactacttgatctctccattcaggatacattgccaagaaagtctcaaaggctcttaatttctgtaccacaccacgaactgaatcgagacggtccctaccaataataatttttttattttgataagcttcttgaatagcacgaactttggagtcaatatctttagtgaaggcatctttcaatatctgatttttgtctacaccaatgggtaaagatccgacaacgacatcaccaccatatgcgctcaattgatattggtcgaaaccattggaatttttcgatttggaagcagtacaatccaataatcttttgcaagaagatacaaaatgtcttgagaattgctcattttgaaaacaaatcttattagcaccaacaagaccatccaatatttgttttcttcttggtaaacaacggaaatattcgtaacttggccatggagcatggtggaagtaaccaataaggacattatcattactaaacttcattcttaataattgtggtagtaacatcaaatagtagtcatggatccaaatgatatcgcccttttgatatatttcacctattttcattgcaaaggcttcattaaatttgacatagtcataccaccaattattctcttgttcaccactacctttagaatctgattcgatgacagatgggtttaagatgtaatggaaagtaggccaaatggtcttgtcagcatattgtctccatctactttgatccttccgtaataaccaaattgggttgtaatttttttcatcctttgaatttaaagcattgttcaaattgtccatctgactaggtgttaaataaaatggttcgtccgcttccaatgggatggagccagttgggttatcgttgttgcttgtagtaatagttgtatcttcaactatgttatctgagctctgcgatttgtcatgtctttcctgttgctgctgctgttgttgttgctttatcaactgagcagttaaattatcttctcttgtaatttcaccagtccagccaactataacttgttcgtactcatctgaatggcttaaatagtttaaggaagagtaaagggcactattgccagataaaggaaacaatttccaagtatttgatgtttcattcaattgaattttataaggtagttgcgaaacacaattaattattctttgtttcttggtaaccgacataattcaggggagtcgaatattcaaaacagtatttctaattgcacagtagatttatatatatatatgtatgtgtgtgtgtgtgtgtctatatatatatatctgtaggagtaggtgtccgaaatattataaaactcagttgttcacacgaagaatattcctgggtataattggaactatttccttaaatatttgtttgtttgtttgtttatctgtttgtttttaactttgtcgcacctcaacgtgaagttgtcgaatgtcaggtataagtaatttgaagcatgtacatacacatgaggagggccagataattgacacaactgatacaacaatcttgctttttattcattaagtaaaaagtgccttaagtttagagaggaatccttactgtgttcttgaagaaacgtttatctgcgtgcaagaacatcgaataggggggggaggggagaaggagaaggcagcaggggttaagttaaggaaaacaaagaaggaacgcctattgatttttaattccgttgtcgacaaaaaaagggaaaaaaaaagaaaaagaaaaagaaaaagaaaaacagaaaaaatccgacgtcgagccaacttctgccccttttctttttttgttttgtagtaagaaaaaaaaaagcaaaaaaaacataaacagtggaaaatatttgagaataaagagtaacgaaaaacggaatgaagaaaattagaaatatgtcgtatgggggaagaggggatggaacaggatggttttaattgaagtggggtcatagccattaaaatatatacttatattgaatacatgcagagctgtgacagattatgtaatattacaaaacattactagttgaaagctttttctctttttctcgactctctttactctctttcccgaatataacgtaatcgttattcatagatataaaacacaagtaagatttgccatatgcttactaaccgattaatagacttcgatatattggacaaacttactttctatgtttgtatattcttataaatatatacgatttattgctatttgtaaatccttgggatgatggtaaataaagtgttggttttaccaaaattcaaatattcttcccattagtatatataatttcattaagatatcttgtggtggattattggaagggttattactattgctattgttgttattgttaaggatctctggtggatctaatataactggtttggcacgtaatataccttggtttatttgtgatatacactgtaaattggcatgcactctttttaaactttgtgatattattcgttgtatggattcaggtacattgttatttgaattattgttgttattgttgttagcaatattagtcaattgtatcactcttgctaatagtacactatttatatggagtaataattggatcttatattgtttttgatcttcaattgacactatctcgtttggatttactatcatattaggattgatattgaaatttggattcaaatttattggcgttggattattatagttgttactattattgattatattgatgttatcattagtattagtactattattgctattactaatagtagtagtaatattattattgttgttgttgttgttgttgttgttgttactgcttacgtttacgttaggattcgacgatactgcattatggatagtttcttgagctatcgctacattagatgccatactattatttatataattattggaattaattggaatattactcatcttatgtaacctgtctctaacttatcttcgttcttccccactgcttcttactgttattaaaatacattatatcatatcggatatttgctttcgtttcagttttatttcttcttaatcattgagttcttctctttttatctctttttgttcttttttttttttcaaaaattttttttctttgagaatacataaaagtgaagtagtttaatgagtggtaatattagtgacagatagatatttgtatagtaatggaattataaacaaataacactctacatgctgaccctatatatacatccaataatgttaaattaagagtgtatgttgctataatatatctgtatgtttgaatttgaaactctaattgttttaggttttatacatgatataaataatacataacgctatgatgatattacatacatatatatatatatatatatatgtgataccaatttatgtaaacttcttagtaggttctttttttatctccttttatagcttaattcaactctcagaaaaagttttctcatggtgtacaattttttttttttgctggaaatattttatagtgcttgaagataaaacaataagcattattaatcgtagtagtgttaaaactgttgcaacaattagttattaagaagtaagttatttttatttatttatactaaaattgaaattatacattagaatagggaaaatacgctaatgggacgatgttgtttacaattatcctgaaatatcttatatgattttattttatatttttgtatatttgttttttgtataatatatatataagattgaaaaaatttaattatagtaaatatgttaacaaaattatcacccaaaccaggatcactagctttagtgatgtaagggttagtacaagtagaatactaaaatatggatattaattatatatataaacacttacaaattatataattggttgattctaactaataaatagattaatcctagttatttgtgttattcttccttcgattaaacctactagatagaatacgaatgttaatgttgataattacctctgacaccatctctcaataatcaaaggtctcctaaataagctttttaataatttaccatctattataatttgattattattcgtttgaatatactcacagccttgggctcaaggttttggttgttctacgtttttcgcctcgatattcgatgttacctgtggactatgtatttcatgattcccaattagggcctcttacaagtaatatcttaagtacattttcatatgaatttttaaattaaaataggaaaatattattttgcagggtacgatactatgtcttggaacgtaagttaaaggatgttaaatctcattatcataacttgttttaatctcatcagttttttcttaagaaaaatttacctttacaatagtgaaaaacttttcattttcttgaaaatttctataatttctatgtataaaaatgaaaaataataaacaaaacactaaaaaaaagaatccaactagtatgaaaaataaacaagtcaaactttcaaaaataatatagcttgatcaaatataaatctaaagttattctttacaatatatattgtataataatgttaatttctgactattataacacataaggttgctaagcatcttatattatgtatgatatacatgaattcacagatatatagcttctcaaaaaatgattttccctaatgttcttttttttgtacatcagtaaaaaatattttttttacacttcatctcacaatattactaattaattgccctttcaagatttacctcataagtcatttttccgtaacagttatcctcaatatacatatataattaatatcctttatattcaaaaagagcaaccaaaaaagtttctttctaaattgacatctttcctctttttaaaaatactaggcaatattactcatattaaatatcctctttatttaaacatacagtaaaatttgtttacttgagtaacaatcaaaaaccaggataccttttttttgtttttgttttatatcgtttttccaacataaaaatatttcataagataaattcctgtacacatctttaaactgaaatatggaaagaggtaccaattattaatctgggcttatttccaaacaaaaaaaaactatggagagaagtgtaccccctcgactatattaatcaaacagttagactattattttaacaacaacttacaatccagtaattattttcttagaataaaaattatcattcctttgttacttcttaatagcgtgtcaactctatccacaaattttttttaatatacttcagtcaacctagaaagattagaaccattttggtgtttaagcgatgaatataattgaaaaaaaaagttacttatgtttccaatgtcaactatctaacttttcaagacatagcttactttaaaatattattatttaactaaccttatccttaaatttaattatcacaacatatctttcatataatactaatatatcctaaattttatattttttgtattaccataaacaatatatgtgaaaaagaaataattaagaacccaatgctaaatgaaagtatggaaactagaggagagttgataccttgtaacatattatgtgctcattaaaaataagaaggtctactattaaaaagtatagaaaaaagtataaatcataattcttcttctttttttttttcgacataatctaagttattccaaataaacaaattatttagatatacattatcacttaatagttacaaagaaattctgaaatcttgaaaattgttactgacacatacattcaacaattaataacgaaaaaaacaaatatattagccgatctgactataataataacaagaaaaaaagaaaagaagataaacatactacttcaagtttaaaccttcttaatgacagtcaaataataatacatatatattttatagataaaaactaacaacaatgacagtaccttctaattatcggtccgggtattggaactagaacccgaggatacttccacatacaaaatttatttccacattattatggctaatagcattaactcttaaatacaatacataatatattaagtagtatacaagataacaataacgcaaacttatctaaatgcaaggcatccattatattgtaaactaaaatttcaatagacaattattaacatgaatttatctctctactatcgattttaccttacttcaaagaacgtcaggtgtattcaacaaaaaataccattttgtgatatcctcttttttaaagttgtattttccctctgccagctaaaattcttatcacttaaaattctttctttaaaagaacatctgaaacaaaaaataataaacttgaagaacgcctcgctattctttttttcttttcttttttttttctttacagtgaaaagatcaaggaaaaatccccgtttattaaaagggtatcaatgttttcgcggatataaagtaatgattgacaaaaaaaaagaaataaaaagaaaaaataaacaataaaaaaatttaaacccggaaaaataaaaaattttctccgtttccgcggaatccaatatttttaacaaccaaacaaagtagagtcccaacaaaataggttagttggaaaaatgtaagaaaactaaaaacaaatcaaatagggtttctctactttaatcatttttactaccctcttatgtaggaaattattcttaaaagaactgcttctcccaacaaatatgaaaaaaaattttctttttaacgaaaaaaaaaagccaacttcttctattagggtttgttattttataaatatacaaacatgcaaacataaggttgtatctatttttttagttgcctttttgaaaaattcgtttgacagtttacactttagagaagcaaaacaaacaaacaacaaaaaaggaatatgttgccactttcttttaatgtgatacttttactttttctttgaattcaagacaatagaaatagtcggttgctattgggaagttcacctctcgagctcactaactattgtaatccactaactcttctttggacttcgaaaactatttctttttatttactgatttctcccacatttttcgacctcagttgttggtaacgtaaatatcgggatggcttgtcaaattgtgaataatttttttggcatttgattttgttggactcatccccagatgtttttgttttggaaattgttcaagcccttgtaatacatactattatcaaatataaatataaatatatatatatatatttatttattgtaaaaaaaaagcctacaaagctttcaagaaacatgatttagaaagtttatctttctttttagtgctattgttgtcttatccccgcattcttttttttcccctctctctctctttctttgctaaatatatctatttaatcttaactattgaaatatatatatatataaacatatcctatcttctcttgaaagattatatagtctgattcactatcacaacagaaacatatcacttataacactattacataaggatttatctattatttttaaacatattggtcactggctaaccttcgttcatttaaaaaactgcccacccctcctctttctattaaataactctgcattagcacgctagctcactatcaatagcctggcttccatttccaatatacccacattcgttcattcccttatttatctatattcactatcaaatatattacaagtcttcgagtaaagagaatacttctactaaatatatattatctatattcatcagtgttcattaatactaccacaattatttccaatggtacgagtattaaaatattgccattttataataatcagattagtcaaagctgctttcaatcaaagaaatataattactttaccaattgaatttatcctcaacttttcattaatatttatttggttgaatctgttctcatatgctaaatatattccaacaaatattagacccgcaatccactcaaagtttgccttcttaatggactcatacctttttggagatacatttaaagaattaaatgcacaatacaatgtcaatgatctaagtatactgtccatatttacctcttctacatttacaatcatttgtctgttattaattccactatctgtctggtattatgtgtattatattagaaaattgaaatataatttaattgattggtatgatcacattttccactttgaaaacatcaacaacgttaaaagacttagacttattgtttacccatatttgataccgttcctttcatttactgtcttaaatattttgcatcttttcactaaacaagaaacaaacaatttttcaaagacaaaggaccttttagcatggacttcgtatgtgatcttacatatcacggtccctatattaactgccatttatttatatttattccatgttccaggtgttgtcaagtatttcagtctttccttaggtattcaaaatttgttaggaatcttcacacatctagtattccccactgcatcaccatggtttacccatttatacggaatcaacgatgttgatcatgtaaattatgaacaagaaggttttgctgctggtttagttagagttgataaacatctggggacccacttaaatacaaatggtttccatcagagtcctattgtgtttggtgcagtgccatccttgcattccgctatagcattccaatgttttctatttattatgaccagagcctcctctttgaaaaatagattttcgtcttcaaatgagatactgccattagatgatgaacaatcatcaacggtgtcttcctctccatcttcttccaccccttcttcacccttctctgaatcatttgattatgctagaaaccaactaccaaacccaatagtaccatctttatcttcttctacatcctctctctctctaactaaaacatcttcaatgttcagtagtgatgaagagacgactcatgaagttagagaaataagcaagtgtcaaatagatgaaaagattcatgatttagaacaatccgtcaataacttagcctccgagaatccattaaattatgttaaattatatgaatttgaccaacaatttgccaacagttggagatttattattttcaacaagggtctcattgctaagatgttaatttccggttacatcatattgcaatggtggaccacaatgtatttagaccatcattatagattcgatttgttcgtagggatgttatactcgttgctcacgtttattattatgaacatatttttcatgcaaccaaaagtgatgaaaccatggattgaagttagattaggggaaagagacgatgtcaagaatgagtctagaacttttggcatgagggtgtttcaaggttcgagatatgaatggtttttcgatccattggcataaaatagaagacaaaagactatttataattcagtattaatttatttgttttcatatttatttgcacatgtacatggatatatatgtacatacacatacacatgcacatatacatacatacatacatacatatatacatacatacatatatatatatatatatatatgacaccaaaaaggaaaaatacaaagacaatataagagattatttcaaataatatactaaaatatggatattacctgtatatatgcacttacaagctataaagtcgtttgttccaattaaataaactaatttacttttatttgtctttgagacgaacacgtataccgcaaatagtcaattgtttcttagaataaatttcttaataagttaatatcactgttaatgtgataatcgtttgtacaagaacactcatagtttgccttcccccccgcagttttggttgttccaagtccttttaaaatacatattttcgggatttccaattagagagcttcttatagagaagaacagtaaagaaaaattctgaaagaaaaaagaaaacaaaaaaaaaaaaacagaacgggaagaacacaaaataaagaaaaagtaatatatatatatatacataaatatacacacatatacacatacatatgtaaatgtatatcgagacaactatacgcgacaatacaaaataagacgaccgattattgagtttattaatagcatcaaacacacacatacacgtatactacagaagaacttgtgagaaagatatataataacacacacacacacaaaagaaaacgatgaataatacaaataataataacagtagtaataacagtagtaataacagtacattgccattgcatatgtatattcgtcccttaattattgaagatcttaaatcagttacagatttagaatctttgtgtttcccaccaaacgaacgtgcatctcgtgaaaagattgagtatcgattaaatacatgtcccgaactatgtgctggtttatttgtcagagattttgattcgatcacgaaagaacttaaagatgaaaaattgattggccatataatgtcaacaaagattgaaagtgattacattacgttgaaatcgatggagataggagaacattatgagtcgagtgacgttattggtatccatgcgttagtgattcatccagattatcaaaagaagaacttagctacgttgttgatgacagattatatacaaaagatgagcaaccaagatatcggtaagaagattgttattatcaatcacgaacatttggtaccattctatgaaagattggggttccatgttgttggtgaaaacaaagacgtaataaaagatccagattttggtaaagataaatggttggatatggaaagagaattaattaaagaagagtacgatggttaaaaagtaagccaaaaaaaaaaaaaagaaaagaaaagaatagaaaaaaagaagaaaaatataagaaaagaaagtagatttatctttctatctttctttctatctatatatctatatatgtatatgtaataaatgaccacagccattattattaataataaataaacaagtacatatgtgaataaatatactctgttgcaaaaaaactaggagaagtacaaattcattaatcaatatacgtatacacagacaaacgaatacgttcttcctctctctttgtatatatatgtatgtatatttagcttagaataactaaaaggaaatcagctgggacaattcaaaacgcctctattccccagaggctaatgtattttcataagatgcgagaaagggaaaagaatgccccaccgagacaaaaacaaaaacaaaaactaaaaaaaagaagaaactctttaaaactattattcatagaaaaagagaaaaatatcttctgtaacaaaagacacacccattttacctgcgaccggggccagaactaaaccattgctagggtccctccccccctcagagactttaaacatgaagtcaaccacgtctgaatacagaaatattcttctagaaaaaacaacccctctctcccttctcttctcttctcttctcttctcttcctccactaatgagactccctcacatctaccacttttagatacagccgcccagcaattgaactagatgattgtgtcatatcatacataacatacatctaattgcatatatatatatataaagtgaaacaaagtgaggagaggaatagataggaaatctcttttgttttttatcttttctttctttctttcctttttgtttttggtttattttatattaacaatagggtaatctcaaagcctaacgttgaaacctgtttgatttctttttattctgcccttattaaagttggggtatcggtttttttgcctttcctttcctgtacccctaatatttaataggcaaaacttctagccgttcgatattttcatttgatattccaataatctgtattttcacatatccacatctctttctctttctctttcttcttctccttccctttccatatctatatacatatacatacatacatatatatatattgaaaggttgactatgcaaattgttttgcttgttattttttctttcttttttattttattataatagattctctatatctatatgctaacattagtaataaaaataataataacataaatctatccaccaattcacacacacacacatatatatatatatatctattacttaaatcaaaactaaaacaaaaaaagaaaaaaaaacgagaatatgagatttattacttccccttcaattagacaattttcaggtctagctcataataatccattaaagtttaaacaactaggaatactttcaaccccttcaaattcaacttggaaaagttctatctcccacgataaatcccatttaaaacctgatcaatctgttgaagaaaccaaagaacaaaaattatttgataaaaaccaggatttcttagatagaatggaacatgacccaagttttaatcattggaaaaagccaaacgatgaaaaattgaaaaaaatcggtgatgatgcaagaattgaacaaaatagacctgatgatggtgtttattaaattaaaattaaattaaattaaaattatctacactacacacacataaactttgcttctctatttctctctttgtatatatataaattctcatctatagctatccgatatattcctctacataattaatatatatatatatatatatatatatatacacttttaaaaggattaaatgttttacctttttttatattatcagggttcaaacctgtttgttttctttttctttttctttttctttttctttttctttttgttctttccctttttgatcatttctctctatatgtaaattcttaaaaaagaaagcaacagcaatactaaaacaaaataaaataaaatagtgatagtaatagtattagatactaataataatggtattgtttttttatatgttatttatttatttatttatacttacttatccctacgtacatgtaaatacaagaatattgatttatagatccattctctctctctcactctgtgtgtgtattttaatttgtaatttccatataaatagataaccagattgaattaaattacataacctttttttgtcgttgttgttgttttcacctttctaataaataaatagttgatgataaataacgataaaattgactgtgaaaataatactacccaagaagaactttattattgtcgatctttatctcaactgactaatgtagctgaacaattcattattgatgatttaaaattagaccaacaaaccctcctaacttcaaaatcaactaataataataagttacacttgaatcaaagagatctgaaatattatctaaatcaatgcatccatattttgtcaaattataaagatcaatgtaaattgctaaaggaaaagtataacatttttttgtcgaaggaaaactcaaacgatttagatgaggcattcattcatctgagtaaggatatttggatcattctggagacgtcttatatctattacaaaattattcacatcattatactaaataaaatacctaatttgaaagaatttatcaacattaaaaatggcatttcaaataataacaacaacatgtcacatcttagaaaggataaagacttaatagaaatttataacgatctgttgaaaactttattaaacgatcaaaacattttacagatcaaatggttactaaaaaaaaataattcctaccataataaccatccacaatctccacaggattcaaacatgtctaatttgccaaacaccggctctacaatatctcctgattttctttttaacactttattaaaaaaatacaacccaataagtttcttattcatcgatgttagaccaaagattaaatataatactagccacatagatatgccaaacattctttgcttggaacctgtatcatttaaagatatttattcggattatgaattggagaaaaaatcaatgatcacttcagatcaatcggagatcgatcgtttcaataaaagaaacacttttaagtttataatattatattctgatgatcagtctttgaaaaatcaaaatattttacttaatattttactaaataaatcttttgaaaaacctattgacaataagttgacgaagatttacatattagagaatggtatctcaagttggattgaatttggtgggaaaataataaaggaaaataatgattcaaatataactcttaataaagataataaaaatgagaataataagaaagctgatgaacatgacctaaactatactcatagtgtctatctaaatggagacacatctggcttacatcttaaatccttacctaaaatgaccccaagtgtatcccattccatggatcaatcaatgaaagctatgatgtcaagcaataccatcttttcttcttctgttcctacattgggaatcacatctcccccctcaacgttatcatacccattcgttacaaataatcattccaaacactccacttttactaattcatacactttaatgtcaaaacaaacttctggacctaattcacctattaactcttctagcacaaataactatactaacaatgatcctaaaagatcatcaagtctaaagagactttctgcattgttaccatcgttcaaaaattcaacatcggcaccattatcatcttcttcctattcgttttcatcaccaccaccgcaactgcagcaatcatcatcattaccatattcttcttcttacataaagaaggattcacctagattaccacaactatattcaactccaacttctgctgtttcattatcttcctccccaagtttactgtctcagaatgttctccataatgataatacgacatatacaacatatccagatacatttaatttattacaacacaacaatttaaaaaattcaaccaataacggccctgaacgcaccttatctcccttaccccaattaccaaaattgcctcaaaaggttatgtctacaacgcaaaattttattggatctgcgtcctcattatctaattcagatatatcttaccctgagaactcttattcttcatccccctcattatacccatcttatttagtatcaaattatagaagcgataagaacactttcactagtccaagtaataacaatgttaacacctcaataatagcaagaaaattacagacggagactttacagaacccttacaatttagattttattgtaggtctagaaaatatgggaaattcttgttatttgaattgtattatacaatgtctattaggtacacatgaactgactaaaatttttttaaataattcgtatgagaaacacatcaacttaaaaagtaaattgggttcaaagggtgtaattgctaaaaattttgcaagattagtcaatacaatgtacaaccatgctacagtttcgaatgatcctatcccattaaaacaatttacgaacggtatcagtaacaattcttttgatggaaatattattaaccagcataataatagtgttagcaatatgaatcgaccaaacatgcttaattcaagtctattaactaagaagaaagaaaatcaccataaagttacaccagtacgacctcaacagtttaaagttgcttgtggttctgttaattctttattcagagattgttctcaacaagattgtcaagaattttgccaatttttattagatggtttacatgaagatttaaaccaaaatggtgggaatccaccattaaaagaattatctaaggaagcggaagaagttagagaaaaattgtccttaagaattgcatcatctatagagtgggaaagatatttgactacagattttagtgtgatccttgatttatttcaaggacaatatgcctcaagattacaatgtaaagtatgtaatagaacttctaccacatatcaaccattttctgtgctatctattccaatgccacatgataagttaaattctagttgtagtattattgattgtttcaatgagtttactaaagtcgagagtttagaagttgatgaacaatggtcttgtcctacttgcaaaaagaaacagccttccactaaaaaacttactattacaagattacctaaaaatttaattattcacctaaaaagatttgataacagattaaataaaaataataatatgattacatatccgtttagattagatctaacagaattttgggcaaatgattttgatggaaggttacctgcaggcgtcaccaatgaactaccaacaagaggccaagtgccaccatttaactataaactgtatggtgttgcttgccactttgggtctctttatgggggccattatactgcttacgttgataaaggtatcggcaagggttggtactattttgatgataccaattatagaacagtaaagaatccaaacgaacctattacatctaatgcctatgtattattttataaaagaatatatggtgatatctgaataacaataagcatcatgtgtatatccattatatatttctttcctctttatgatatatttaaatagatatgtctgctacgcagctgatatattcaaaaaaaaactaataacatttcttctaatgattagaaaagaagtatggtaccacaaaatgtttgcacacatatattagtatgttatgcaagttactgtcttgtagcaataacatatttattcccaatcatcatcatcatcatcatcatcatcatctcctttgtcatccatattatttttcttattgctttcatctttcttcatatcttctacattctttaggtaagatggtttactgctatcttcgacatcttctttctttacaataacaaccgaggagtcatcatcatcatcatcatcatcatcatcatcaccccaatcaacttcctccatctcttcaactttattaacactttctacaggcggactattcttgtacttctccttaatgtctttgtctttagaatactcatttgccaataattttaatcttttatcttccctatctagaatccttgctctttcatataaataaatcgaccaaaatttggtatatgtgattgaagccgggacaagtttattcatcaacgtttccagatctttatcttttctcaaaatttgatcaatttcttgagttctatccttaatatttgtgatttctttaaaattgtcttctggttgatattctaaatataacaatttattatttgataaattctttaattcagtttctgttctactaccacctataattaccttgccatccttctcatcattcttaacagtagcatgttcctttgaattagtattcgggaaatcattgtttataacatcagacacaaaattaacagtattttcaaactgagaagtcaaattttgtgtaacatttgaccaaaaatttgactttgacattttattccaatatgaagttgctgcattttccatgctagctaaattattgtctaaagtttcaatatatttttgagccttagttgaagccttttcatcaatcaaaggtattggaatagctaacccttccgtatttacatcattaactatttccttcaatttgcttgctgtcttctcatagacatcacctatttggtcttctaatttatcaaatatgtaattagttctttcatctttattcaaatggggagactcaatatcattatcatgattcttttcttttcttacacctatttctttgtcaactttttgttgatccttaactttattcaatacctcttcttcatagaaaaattccatctcttatactctatctaaatgtatatataaatatatttagtttgctatattctattatatctcaatttatatgtttacatatatatatacatataatggacttacctatacataaatgtgtgtatatacttgtgtgtattggtatatgtattatatagttaaatttatttaccttaattcaaaattatcataagatcaattttttttttaaatcaactttgcttaattagagcctaataaatcagtattgatacacaaatacgtacacatatatacaagaaagggccaattaaaagagtatgggaattaacaagagaatatattcataaagtagctaccaatacttaacattttaagattttgatacattgggaaaaactctaaggataagtaaaactatagatcataataacatatatacctatatacatgacatacgttacgcctttacattacaatacggttcaacctaatctatatagaggatcctatccaagagaaatcaatttctcttttttgaagacgttacaattaaaaaatattgtttcactgactcccaatccattagatgaaacagtacaacatttctgtaatgaaaacaatattaaaatgatacatatagaatgtaataccaagaaaaatctgaataagatcaaagataaaaataaaagttctaaagaagttaaagtcaagagaaagaagaaaccggttcctatagattacaatgtggtaattaagactattactttcttagtggataaaaggaattatccagtttatatccattgtgaaactggtgacctaataacttctttagtcattgcatgtttgagaaaattcacatattggagtacagtatcgatccttaatgaatttctgatctataattcaagtattaatgtctatgagagagattttattgaaaattttaaatctgaaattgtgattgagggattaagtctagaagataaagtaccttggctaagtgttcagtttattaaaaaaaatagtggtagtaataataataagaataattcaattgagaaaagtagtcagaataatgacaataaagagagtgttactgtaagcggagttccaagtatactacccaaactgaaatttcacagtctttaaaacgtatagcatttaacttcttctcctccccttcttactttaactataaatatatgtactattataccatcaattataaatatctctctttctgtaaattcgaataacttggacctgctaacgtactataaaaagatcatcggagttattaataaaaaaaagagaaaaattacagaaaatgaattagataggaaatgaccaacatagtagtaactattaccatggtacatctcagactaatataagttatctatcgatttatatatttctctgtgtatgtgtatctatatataatgcttccatatatctaagctgtgtagcggaagataagaggcaagcactgaagcaaaagttatgattgtgacggtatttgatataaataaatatgctttaatgccacatcaaacacatgcaattatctctaaaagagaaggtgaaatgataaccaacactattacatctatgttagaggattcatattgcatggattttgaaactttaaactatatgaccagattttatacaatggacgattttggtaaactcatatttaaaagaaatcaacacaatagatgtggatatccattatgtaaacagctgttatcaaatacatctataggattaaataattgtgggtccttggatagttattgtgacgaatcacattatgattatactaattttattatctcacaattatacgacataccaatctataaaagaggcggtatacatttgataaacagatatgatttaaataaagtgaatagagagaatgacttttttcaaataaagctattggaagaaattttacaggagaaaaatacagaatatgatttggataaaatgactgatgagctaaacaattttgaattgaaactttgacactattcttcacctacatacatgtttatataccttcgtttttatttgtcaaaaatctatacacagtcatctttcaaaatgtaataaaatgattgtcttttagaatggttattaaattgttctctttattcctataaaatggactggtagaaggaatcctttctattatcatcttctcaaatctttccttccttttccaatacatattttcggcttccttcttataataatcatattgaccaccgtcaatcaatctattctttttgaaatcttcgaaatattggctcctctttctggaatcttgttcaattttttcaatcaccatttttaaaggttgtaaccattcatttacaagtggagataactgactattacccttcaatttcatatacttatctaacgttatattgttatccttttgcgctgttttattatgtaagcaattactatttgtatctatcatttgttcccatttggcttcttctacagcccaaaatgcatgaaatctatggcataaatcaatagaatctatctcggactgatgccgacgtctagtctctcgaattattcttcctaagcccttggattggtttttatgcttatttactgctgatctgacaaaccagattttacttttaccctccattgtatatgatagataggtaggtggtggtccttttgccaattgcctactaattttgttaatttgttttaaaccatactcatataatactattggtaatagtagttctcttttatatttcttcaaaattcctgttggtaacaactgtaacttttgtttcttttgacaataatccgataatatgttcatttgagtcttatattccctggtatttgtcggattctctgatggagtcacccagggtgtcaactgcttcactatattgtgaagaatagccaactgtgagtccctcaatgtttttggtttcatttgtaatctagaaagcctctgctttcttgactttaatatagtcttaacttcatccaagttatgatctataatattattatttaattcatttagatgtttcaactgtgcataaatggtccatgatgatttttgattcttaaaccttcgtattgttgtatttaattcatttttaatagcattggcaaacccaatagaatacagattatgattaatgttccttaagacatgtctatatagggttaaaaccgatttacgatgagcctgtaaactactgaaatgtgacataacctttattctcgttttgtctgtcacttaaaccgtggtctacgttctcttcctaagacctacaatatatttttataaaaatacttttgaagtgtttgttatatacacactttaatgataggtaacaacctattttcttcccattcttgtaattggttattttggtttttatttctttagaaaataaaacagacatttgagttgaaccatattctcaaaatcatataggaataggttcctgcgagagggagggggaaaagactgaatattttgaaacatagacaacttttaaataagaaagaaataaattaaacgtaactaattaaaaaatatataatacgactttatatttacttaataaaaaaaatactatatttataaacatcacaatttaattaataaccttcttagttgactaaagcagaagcggtagcagattcgtacttccagtttggtggtaaaacagcaacctttctgtagtatctagctaatctatggattctagattcgatcaaaattaatctgaacttagcatccttgtcctttctgtttctttccaagtgctttctgacagaaacagccttcttgattaagaagtataaatcttctgggatttctggagcaagaccgttggattttaagattctcatgatcttgttaccggtaatgatcttagcttgagtaacaccgtgagcatctctcaataaaacaccaatttgagatggagttaaaccctttctggcgtatttgatgatttgttcaacgacagcttcagaggataatttgaaccaagctggggcatttctggagtatggaatagcagaagaggagatacccttaccctgtttaaaaacaaaacgaaaataaatacacaggcgcagacaaaatgaccatatatcattaacattcgccaaaatcaaattttgttagtcaaaaaaagaactcacacctcttgaaatacatgaaatacttaatatcaataagacaagatccacatcagcttatgatgacaaatacaaaaaaactatttacaagatcacagtcaatctcaagatatcttttccctttctttatcatctattagctattaaaagcatacccattttttctaagaacatcaccaaagaacacatccattattgcccttcccgaatcagaaaatgaataacagatatgacttctaggctgggagttaacaggaagagctctgtagtacttctacaccctctcagattttactccactaataatactagaaaaattggaatcacccagctactatatcgtgacaaaaccattaagaaaatggttacttgtcaaaaaaagaaagataaaaacaatctttttattatgatatagaccggcaaaaagtcaactgattgaactgtgatcctaaatagaaattgcactgtagcaacattaatacgatatgaatctctcatcccatcgatatatatccatataaactaaaaataatcaatgaataaacatacggaactgtgcatacgacccatggtgactgattaatttattgatggtttgctgagctattttggacgagcagtacaagtaaaaacaagcagtatcgaaaatggctcaggaggataaatacgctaagtgcatcaacatcttctttaaatatattaagttcttcgaaaaaaacattgtaatctccctctttctctttctcttttttttttttcttgaatttttcgaaatttttaaatgctgttgcgtggttctttttaactttttttttttattttgtgggactgtctactttcctaaaatggaaaacgagttaaaaaaaaccaacaaatcttcaaaaagaaaaatgttagttttttttttggttcgaacatgaaaggaaagaaaaagaaaacagtcctggaaatttgttgctaagacactttcaattgacagaaaatggttttttttgtatattctataagtaaagcaaataaggagataaacaaagtatttaagaattattcacgatactacatacagcatatgatacctgtcgatctatctacgtgtttcaatctcacagactagttcctcaacttcgtcatcgtcctccaaacccgatgtaatttcgatagttttagagggcccgcataagtttttaaccatttccaaagcacctgcatataacattttccattcagaagataccactgttaacggtttccaatatagtagaatcaatggtgtttgtttgatcccgtctttgttcgttaaagggtaggccgttaaaacaaatcttggtgcattatccggtaatatctctgatagatcacctagctcattcaaatcttcgtcgagctcctcttgttcctctctgtcaacaacaatagcataagatggagatggttcaatcttgatgggtagacactttattttttcagatctggacgtagaaattctgaatttttgaattgtctttttagtgtcttctgacaccttatataatgaagccatttttacccttctctactatatatatttttaatggtaaaaggataaacactatcgatagtttatcctatctatttttctatatatcgttgagtctcgacactaactcaaaagtggagtggtttgaaggtttcctacagtgtaccctacactttaatatctttttcccttgtatttacaagatttttcattcttttatgccatgtaatggatttttttttcctttgatcctccccccttttgattctccttccttttccctactaaaattgttgaactgtctttcaagcttatatagataattgcacattataatgaataatgctatgtattagtttattcatttgatcagcatcatataatattaacataaattagcaatagtatatatatctatatatatatgtgagttctaaagaaataaagaaaaaaatatatattaaaaggaaaataaaaacaagcaaacaagttcaatctatctaacacacaaaatatttatcatctttacagtcctctggcgttctcttgataacttcttcaatgtcccatctctgtactttaccatcccaactcgatttaccagagtttaattttaaatttaacatctcgccaacctcattgacgtgacgtaaaacataatcaatatcttcctttgtcaatgatgcagacatacagaatctgacacgtgattcaattaatggtgtggctggatatgctacaataacaacagcgatgtttctttgcaacatgattcttgaaaacgcaggcatcttagatggacaatacaatagcattggaatcacaggcgaatctgcattaccatatactatgaaccctaatctttgcaaaccaagtctcaaataacgtgaattgaatgcaatacgttgtaatctttcttgtccttcacctgggtttatatcaccgataataatcttcaatgaagatataatctgtgctaacacaggtgcaggcattggttcagcataatttggtgtagtcaaatcaagccttaatctgtcaataatccacttatcacaagcaatatatccacctgcagcaccgaacgattttgttaaagtacccatcaagatatcgatatcatttggatccacaccaaatagatcacatacaccacgaccatttggaccgatggcaccaattgaatgtgcttcatcaacgtacaaatagcatttatatttcttctttaattcaattaatttgggcaaattacataacgtgccttccattgagaataaaccttcaacacaaatcaagattttcttccatggacgattagtctttggttggcccaaaacgatctgttctctaatcaatttctctaaacctttcatatcaccgtgcttaaagactcggactgtggcacccgataatctaacacctgttctaatggatgtatggtttaattcatcggagataattaaacatttagaatctaagaatgcattaaagaaatttgcatttgtcccataccccatagaaaataacattgcgtcttctttaccaacaaatcttgcaatcaaacgttcagcctccctatgtaaatcagtggtgccaatttgagtacgtgggccaccagggttgataccatatttctcaacggttttgatggcataatcagtgcatttcccctcactttgagcaaaaccaagataattataggaggaaaggttcaaacacattcttgtagtaccaggataagtgaagtattcattaaacttatgcgatactctattaatacatgtaatgaatctaccagggacaccagtagctggcctagaaaaacaatcgtcaattctctttttcaatcttctaacatagaaactttccaagacagaataccatggtgccataccatccttctcgattaaatcagtgtacttatttttttgaaatcttatacctaagaaatcatgaacatgaccaaaaataattaatattaaatagttgacataagttatgattgaaatataataaggtggtgtgtctatcacaggatctggaatctctttcccttcaaatgatttaacttgatgtaaataagttttactagttaaagtaccaaattcattttctctttttatttctattggtaaatttggaggagtaattaatgggacgtgagttggatcacgtttatcttctttgaaaggcattcttattacctatcttttttaatatttttgagtattttttttaaaaaagttttaattaatctcttaatttcctgttgctaggtttatagataattatgttcttgttgagctgatagaatagaagatcttttatgagaaaagaaaaaaatttagataagcaatcgattaagtaaatggacgggctgaaacacagaaggcaacaatggattatctaatgaaagaaaggaaaaaaaaataataaaataaaaatcagattatatttatctgttattatcagtttaattatgtagttcggcaacctactatgctgccaatatttataatccaagtattaacttgatttttttttctttcttcttccaactggctaagccaactaaagttcgattttatatggttttgtgctttatgaataggccaaacacagatatagaacgatttgacatagttttttttttctctcttcctctatttgttttttggtcttttattttctattattttacgagggagagaaaatggttctgcgagaatttgtcactaaagatggtggaaagagaaaaaaaaatgtacgggctttttaagagtgctaattcgttgatgagctctttttctctctctttctttgtatacatatctacatttatacatatatatctgtatatgtgtgtgtgaatggtaacgatgaaagaaaatatgatactgatcgtgtagtgtagcggacagtagttggtgggtaatagctggaccaagagatattagaaacgcataataagattattgaaattgtatgtaatatgagtatttatacatgtttacttctctacatccccaattatatatttgcccggttccattaatttaataaaatggtcacatttaggtgtttcactagctacatgtgcaataacaagaacagtacctggccaagattctaaaaattcatgacaacgcaatactggttctacttccataccagagaacgcctcatccaggattaacacctcaggcatctttaccaaagctctaataaataacactagtttttgttcactaacagttaattgttcaaatactttttgatctgtaatatgttgaattccaaagtaatctatgtacatattaataatctcttgtttttctttgtccaatttcttccacatcggaataaaattgtttgcagaaccttcatggaacccagatgatatacattctctaacagttacaccatcattgattttctttgcaaaaatcacatgtaattcaggtgatgacataccaattcttttattaatgtcgaaataatttgatttacctgttcttctctgctggccattttcaataaccttggaattccatgattgagggtgttctgctactaccatagatagtaaggttgtcttacctgttccattatctcctctaatatgccatttggctcccttctttactacccatttcaagtcttttaatacaggttctcccttgtatgaaacattgacacctttaaattcaatactagctggcactttaaaaagttcatgtttatccttgccgtaaaatgggtgtgctgatattaagtcattaatggaatatttatttgtctcaagtaatttcctttgactaatttcaatctgttttttagtttcagtttgtaaggattcaattttatcccgaacttgtgatattgcaccttgaaataaaacaccatatgtttcatccactgtcactatatgatcacaccaacttggaattgaatcctggtatctgagtccaataatcacagggatattaagatcttctccacatttagccaaaaatttagatataatggaactagcagttgaatctaatcctaagaagggatcgtctataattaccagatctggcttcttcaaaaatgctttcgctaatctagcacgcctcatctgtccattagataaacccatagcccatctgttttgtaactcggttaactttaattcatctaccaacttctcatataaggacatgtcaacatgacgattagttgtttccacagaataacttacattgttagatccaatagagttatctaaaatgaactgcttacaagtctggtcaaattcatctttgaagtattcatagcgtgcgcctaaatgtgctgtgggaataacacctttaaattgaacttgttcgattttaggctcttttgaaataatccaacggaatcccaaaggtggatcacacaaaaatttgttgcttaaaatatcaattaattttgatttgcctggaccccaaatgacccatttttcatttctattaatcgtcagattttgtattggaaccttgaatacaggaggcgattttttatttaatgaagatctgaaaagagcattagatatttgaagaatcaatccattacccctcgacattactaaggtctatttgcaattcgtctcagaaaactggtatcacatcgaaaagtgattaatacagatatcatctgaaataaaaagtatttacgaacaatcatataaatatttatccacacacacacatatatatatatatatatatatatatatatataaacggataattgatacaactttgcaatattgctaaaagagatcgatgggttaagactgactcattagttctagagaattattgcttctaaagaatctgcaaaaaaaaatttagatgatctccaaaagagaaaagaaaaaagaaacgaacaggaaaaagaaccgaaaaaaaagcaaatcgaagatattccaacagtgataaaagtataaagttcgtagaaggctcaaaacatatgagttcatgctgtttaagttcttgaagaaaaagtaaagataggatataaaatcttcaactacaacacgcattctttgcaaattaatattcgattcattcattatgttatttttttctttttttcaaaactttggtagatcaagaagtggttgttcaggtatgtgttaataaaatagatagttgagagtgatagataatagagatttactaacatttattcaatgtgtccttttatagttggtttctttttcttttatctttgaatatgcttcattccttcattaatatgattcttcaggtaatgctgagctttgatatggtgtcgaggagaataagaatatgcatgtggtgaacagtattactacaagcttaagaaactaaggatagaagtgacaatttgataaaaataaacttttgacaaaatatttgttgtctatttcttttttttttttattttttgttagttaaagaatgatattgagataaagggtattttgcaatcagtggatcaatttttaaatcttaaattagataacatttcctgtacagatcagactaaatatccacatttgagttcagtaaggaatatatttattagaggttccacagtaagatatgtctatttgaataaaaatatggtagacaccaatttattacaagatgcaacaagaagagaagttatgagtgaaagaaaataagatgactaggatggtatatgtaggggaacaagtaagactacattgtattaaaaaaaaaaaaaaaaaaataaaaaaaagaaaaaaacaatattttcatgaatatataagtctatgtatatgtgtgtatagatatatgtgtctataatttgtattttaatattaagagatgttgttgctaatgtatattatatagtcgtttgtcacaatgtgctcttgtatgaccaggctggttacagaaagaacatggaattttgttcttcttcttttttctagtttttttttccggtttgttcttatccactaaggtatcatcatagacattattacctgtggtatattctttctttacaggtatcaaagcaaaagactgaccatccttttcaatgatgtcaatcttatctttcaacaaagcatctaatttagttgtatccacaattgtgttgatatttgattgatcattctcgttcaattttaatattagattaattaaagtgtttaaatggtgcaatctattattgtattcagtttctatgtctttatttattgtttcagtttgtttccttcttgcaattatcaatttagctatagaatccagtgcatttgacatctttatgatatcattattggatgcatcatgcttgtttgttcgatctttaccttgtaaaccatctttttgacttgaatgtttgtcactattcataatttctagattatatccatatatgtggtaatatgtgtgtgttacttttctattttaaagagttaacgaaaaaaggaaaaaatttttcaaaattccaagtaatattttatattcaatcttctattgtgttgatggtattttctttatctgccattcagtataatactaataatatttttttttcttaacctgttagtgctaccctttgtgattctgtcttttactcgttattcttattacattttagataatattaatttttttttctgttttcgtttttgctatagtaccaaatatcatatcacacgaaaagcacgaactgctgatgaaatctaataaaatcaagaaacctcattagagaacatgatgaaattttgcatattctggaagctaatgacaactgcttattgtaattatgtttttaaaccattgtttgttctgtgttttccatattttttttatcaaaaaaaacaacatttatactacttaaataactttctttcatgtatatatatattgtatataatatattcttcttatttaaattctctatttgcgctctcttgagtcacgtgattgatcaatgcattactctataaagaggagttttttgtcttggttactcgtgactgtaatggttgaggggacgcaggtggttggcgtggactgcccggcttgggaacgaatgttccttgcggtcggctgtgggatttgctgtctgcctttgctcctgttcgggggtggggtggatttctagattagcgtctagcggcaccacggtctgggccctgtgttcttcggagcgcagggtcatcttactccaatggggtccttttgattaggacgtgttccagtaaatcgagcttggcgagtggctctggcttaacagcgtgagaaatccgttgatttgggtcgatgccgtaaactagcaaagtaacctcttttcttctgtgagttgtgcttacgtttcgtacgttgtgcggtctcttcagaaggggagtatatgggcttcaatgtaactgctgttaggggagctttatccagcgatggcaacattgactcgttaggaggcgactggaatggcacagttcgctaatcgggatttctattaaaaaagttggatactcagacagtcaaagctgcgtaagtagcggccagtcacaaattcaagaattggcggaccccatgtctctttttatcttttaattttcattatgatggtggtaattttgtggctggaagcttcaaataattgtttttggctcttcttgttggtcccttctgctcttaacacagttgtctcacttattttaatgtatacttaacagaaggagatcttaacaacaaacgattcacaatcaattcttcatacatacatacatacatatatatatatatatacatttttgatgaataattgtaaaaatatattattttatcttgttaatgtgaagtactttcgacctgattagaattaagaggattgttcaaaaaatgattttatatcatcttccctaacaaccttgcctgtatcagcaaatgattttaaaaaattattcagtttcgattttagattatggaatgctacaatgttctctgccacttgatctctattctgtgatgcttgtaaaaagtcttttgttaattggaaaatgtcagtctcattcttttcttcttcttcttcgcatggttcgtatattggatcatcatcaattaagaatggaacaattctgtctaaaaatagatacagtttttcatctttgcctttaatcgactctttgatacttttcaaagttttggaataatctttcttaagaaataaagaataatatttgcatgtttgagaattattcatttcgttaaaatcacgtttctttgaattatcttttatatctttctgaacatttatattagggtcaccatgaaataacttttgactgaatagtttctcagctacctcatgagatagtagtttactgaaatagtatgtatatttagatatacatttccagcagataaaagaatcaaagctttctagatttgggaaaccatctggagcctcctctaacacttctcgatcctcttcactttttcttctgattacctcctcattttttttccccataatacaataatcatgataccaatcttcatcacactccaatcccaaaatacattgtaacataactgcaggcgaatctgggtcatattccttagaacaactacagaaaagcccttggaaattttgattgtatacattatccgacgccgatacatcatcagacctattttttctaagctcacatcgaatttggtcatggccttcaactcgattatctctatcagtgccacaatcacacgtaaaatgtctcttggtaaataattccacaatatcacagcttgtatgacataatatggaacaagaataacatatgccaatattattatgtgttctgcatgcaaatatttgttgtctgattggacctatgttgtaagtacattttttcggagtccatggcattaactcttttgcttcctgttctaacgccaactgattcgatatatattcagttactgttaagtcatcattttttaataacatggtaaacctgattatcttgatttacaggaactgtacttattttttttttttgagaaaaatagatctaagcctatatattttctccattcatacaaacagctcacgaaccatgtaaaatacatggaattatcactattgatccgagtataagctttttgttttggttcttcagatatttttttttatttctggtgtttggcaatgttagtaaaattcataaaaaaaaaaaagagattattcgctttgaatgataaatcttacagtattgtacactttaaatatataaaagagtttatatagaaaaaacagctctagttcgcttttgaaaccatagcttctgttgaacattatttacttagccacagcttcaactttggtttcattatcattagtagaaatctcctttggttttggggcttttgcattgtctttagcagtggtttcaatgttaaagattctgtataataattcatgtgaatcttctttagaaaccatcaagttcatacatttggttcctttccaaacaggtaaaaataagtcttctccatcttgtctttcaaatttaataaaggcacaaccagaacttaatttcttgatatcttccaggaatttattatccacatttttggcttctaagtcttcaatcttagggaatgaatcagttaataaaagtttcaacatatccaagtttgctgatacaactctgctaccactcatgtggtgtttcataattggtaatgattccccttgtattctccatgaacattcaatatcacttctttgagacacaaataacttaacacctgcataaattatctttaatctatcatcgttggcttggataatatctcttaatgaaggggaaactgtataaataactcttgttggttcaccagtggcattacgaaccagacatgtatttctgtcaaagttatcatcaataccataaaacttccaacaagattcaatggctttgtgatttggatcaacaaaaatgaatggttcttcgtttgcatcacgtggcaatctctccttcttctgtggaactacagcagcctcatcgttgcttttaattttcttttcatccgacttttcagtggagttatcaggtagtcttttcttgtcgtcattcttttctaaatcgccaatcttctcaaaaacagtgataaagaaaccaccagtattttgttgatgtgggtatactctcatacagttttgtaaattaaacttagaaacttcttcggcacttggtgggaaccaactatctaatgtattttcatcccctttagttctgggttccatgtttctattaataacaggccatgaagtgataccttgacttctgataagaccaggtaattgatcatcacaattaactaatctgatggaatcaccccattttcttaaagcttcggctacaacagcttcattttcaattggatttagggaacaggtggaatatactaatctaccaccattcttcaaaaggtgtagaccacgattcaaaatattgaattggacttgatgtaaaccaagaccactttgagcgttccaatccttccaaacattgacattctttctcatcgtaccatcaccagaacatggtacatcacataaaattctatcaaactttaacaagtcaacttttctatcagacccaggtacagtcttgatacgtgggaaaaattgggcatcatgattgactaccattaaattggcgctatttaaacgttttagttgatgaactaacatatgagatctcttagcatctgcatcattagccacaacaaacccggttggttcatcagaatccgcatgtaaagcttcaattaattgagcagtcttcgaacctggagcggcacacatgtctaaaacagtgtgatgaggtttaacacctaaaacgataggtgggatcatcgagactgcttcttgtctagaaatattaccaactgcattttctataacaaggaatctttgtgtctttgcaaattgttcattctttctgataacggtctttggaacgtccagttgccaagctaatttatttggataccaatgcaattccaatggggtccttaaaacttcaccttcgtaggttacattggttaaattaggtaaatgtctttctctgaaaaggtttaaaacttcttgagcatgagctctagaacctgtaattctgaaagttaatggcaatggagtttgacaagtctttttaaaactttcccattcattatctgggataacatctaaaatatcgtggtagtattgttcccatttagcattttctttaactaaatcattccagtgattttgagctctgctatcatcacgagcaccaaaagtcttcttgttgccgtttttcttgttatttcttcttctagccatacttcttgatattcgagacaatatcttgagtgtatacacaaataattgaaaagcttttaagagtgtatgaatctagcagatgataccaacaaaaaagaactatagaaagctttctgctatttttcgactcatctcgtgctgtgattcattttgaatttattctatttaattgtattcaactttattagtttttttttttggcgtctaaaattttccagaattttttatggaaagggcacttgggaaatttatgaacaaaaagaagggtaatatagaatattatcatttatttctggtgcatttttaatttttgtatagggtgtaagttggtttgtatcatcttcttttaattctcttcactgtaaagacaataatgaataaatatataaataagtaagataaacaaaaaggaattgtggagactttgttagtgttgatatctaataacatataaggttctgctgcagtgtttttataattattaatatataaattattagaaagattaaaagagtgagtatttataacactatcttaaatagatgtaaaaaatctattctctgttaaaaaatgaaaggcacacactcctcaattgtttagtttattcgagttgtgttttatgtagaattcaatagagtttattcaaaaataaaaaatgtctatgctacttataaggaggaactcaaaaagtatattcaatagtataacaaaaccatatttgtaatacatgctctgcattctttttacagtggacattttttgtgcagataattaatgattgtttactgtattgttatattcatattaaagctttcatttacttataaagtaacttgaaattatgtccaaaggaattaccaataattgtaatactgagaaaattatatgataaatgattatttataaaaaaaatagtgtctttaataggtaataatcagttataatatattttgaataatgtttttttaatatttaattgtaacctaggttatttataacaaaaaaaatttttaaagtccttaacatttaatactatatatattcttaagaacaagaataaacttattattatttaactaactctctttttattcaatactttattaactacagcttttaaatagttttcctttttacatagctataaaatctgatgttataacagtagaaattactgtatttactagttacgaagatagattcatacttttgggatattattgaatgtcaattcagacagtcataaacaatttttttttcaggacttattatcattgtaactttatcttactaacaaaaatttttagaaggtagaaagactgaaaaaaatctttcttggtttagccgtttctggtaataatcagtgctatagcatgatttcttcgagaagagaaagataacttggcccttgagtaatggaaatgtatcactgcataaacatatgagtatatatatgtatatatatacatatatatgtgtgtgtgtttaataaacaccccataaaaaacaaaaactgaatatcacttagttgaagtttctataaatagtaaaaaatgacagttacttatccagaagttgcagcatttgatttagattacaccgtatggccttgttattgtgacactcacttatttccaccttttaaacctattaagagtgcaaatggagaagtgttaaccgttgaagatacacgtggtttcagattaacactctacaaagatatatccagaattattttagacttaaaggaaaacggtgtgacaattgtttcagcatcaagaacttgggctcctgagattgctcaagagttaatgggtgttttcaaaattaaatataatggcagattaataactttaggtgaattattcgatgcaagtgaatggggtgaaagaagtaaagttggccatttaagagatgcaatgaaaagtttatatggggatgatgacttaagaaaatataaaatgtgtttatttgatgatgagaatagaaataaagatgtagaaagatatggtgtcaaatttattgaagtgaaagattctgaaaatggaccttcttggaaattatatcaacaatatctttcctcatgataaaatattgtaataataaaacatatttattatgtttctccataattcaactaaatttagctggactattcctttaagttattatatcaataaaagatcagatggaattttgataacaaaagagaaaaaaaggatacagagaatgaataaaaattatagtattataaaaatataaaagaatagtaattatgtttatcgttatttcttaaatttagaagttttcttataaaattctaatttctaggtttacttttttaaagttaaggataattgaaaagatatttgtatttttcatataggttagagatttttttaatattattgagaaaatagaagacaatatatagaatatatgcatgtattgaaggttacttctatataatatataccttatttttcaatggaattatgtttagatacgctggtatgtgaatgtaggtacagcaggtttaaaatcaaccagtatcattattttatacaaattattagatatatgttatggcaatatacaaacgcttctcagaattgaggacgaattgtcagttgtacactatcggatcattattttagaggcacatagtaacaaaatatcagcatgcttacttactataactctataataacaaatagccaatataaaactagaattttcaagtgttattatataaaatgctatttatattgataacacttttttaacatctacagcttatgagctacttagcttttaatattacacttttaaaagggtatgcaatatgttttgctgctataataagagaaagttataaatcaaacatatgtgtcaataatatagaaaatataaactatgaacttttttctatatacttaacatatctattttatatgtcttcgattatcttaggatggtagatatcggcaaaaaactttggagggcctgaactacaattgttttgtatactcagatggttaatttttcaattggacaaccttttttctatttaaagatattcatattttaaaatttgcgttctttccaagtccaaaaataaattttaaagctaagatcttatattcagtaaccttatttgtaggatcataatgaattactagttttatattagatttttttttacaatgcttacaaaattttaaacaaatttctatgtcaaatcaaatgttctacaataaaactaatagaccaatcagatttgggcatatataaatcaatcaaaattgtggagtaatcattgtttacttatcgttaaacgttaacaaatctgattggaaatttttgccttctgtagaagaggagtaacaaattctaatatatataaatccaagtatttttttgtgtcgtaccagtacttaatacacagattttgtatgctgttatttcagtgttatataggcaaagaaagaataaaaaagtttacgttaatattgtacatcttaactctgtaatgattttaattgagaatgtatacaacatatcgagtgaataaaagtattaattctcaacacaaacatatacagcaaaaagaattaataagaggaatcaagaacagaaaattgaggttattgtatagctataatttagctatatttttaatattatacctgaagatataatgggagtctatatttcaagtcttgataagtggattattatttttagttctaacttgactgttatcagaccctcactggcaaggaataataaaagtcaatgtgacaattttgatattaattacaaatatattttagaaggttttcaaaagaaatagaataataatgttaaaggataaaaaaattgaataataataattagggtatatatttaatatacatatatatatatttcatttcttgcctatctgtctataatgtttctttgttttttttttagggaagtcttgtaaaatactattattatttcgcatgtttctaaccacaaaaaagcatcttttaaataacacttagttaaatagtcaatgcttagccagctccaaaccatcatataagggattgatatagagtttcaattttcaaactaaaaatataaaaaaaatagtttggaacaaaattgaaaatatacaaaagggatatctaaaatcaaacttaactatttgggtttcaatatcatgaagtgcagagccagtttgatgaaaatatgaaaataaaatagtgaaaatattacatacaagtcagtcatcagaaaatatttcagtagtttataattacactagttaatctctatattttgcaaagactgtgattaatattaaatggatattacaatcattgaagataataattgttataagtggtaaagcaatcactagattgtctctaatatattaaacggctatattaagtttgatattttatttgttttattttatatatatgatataaattatttagaagagaggagttaaagaagatagttttatctccagatagtgttgtctttttgcatgtttctgactctcgcttaatatttcaatttagtgtatttgtgaatcagtaattcataccctaatcgttaattgtgataattcaaaagagccacgtaaaacatttagaataataggtaattgtaagagttgttgtatataaatggatgaatcatatcaattagtataagtataaacacccttacataagctctatatattactatttaataaccctgatgttgtattattacctcttcttgtatgatattaagagttgcctcttaatatcattactaagatgtatttaaataagatgactacccctggcatatctctcaataatcaaaggtctcttgacaagatttgatataattctcactccctggaaatcctccaatcagattcaataccttgtacgagccactgcgcacatggctgtaccaatcctccacccagacactcagatgttaccctcggaattgcgtatctactggatttccagttaggttccttacagaaatgatgaggcagtgacacttagtgagatagtaatatttttaagttttagtattttatgttgtataacaagaacgtctttgataagaaaacatataaattatgtataagagaggagttatggaagatagttttttattttcagaaaacgttgaccttttatatgttttgtgaaactcaatcaaccattcaaattaatagattaatggattaataatctaaacctcagtttattcatcgtaataatttgggtgcactaattataagtgacacagttattacgattattggtagtaagtctcaaacttactaccaataatacataattctagattcgctcagaattttatgttgtcttggtggtaataacctctttattttatcatgttaactgttgtaatatgaaatggtcagattcttttgtatactttgggaaagtgcagataatattaacagttattcaaataatcgagacagtaatcaactataggcgataatataattactaaaacggtcttatatactgagcggcttttatggtgctaatatatttattcaaagttacttcttgttacttgcttgttgttctatttatttttatatataatatgtaaattatttacaagaaaaggttatgaaagatgatcttttatcttcagaaaacgttgtccttttatatgttttctggagctcgatcaattattcagatttgtacattaatgaacttagtgatccaaactctaatatttattacactaattcaggtacactagtgaattagtaactgcaccccaattcactagttatggtaattaggtgcactactcataaatagtacaattattatggtcattagtaatacacatgggactcattaaaacaataggtaaattctagatttgtcagaaccttatgtaatcttactggaactaatttttttattatacagtatctaatgttgtagcatgtttatgaattattaaaacaataaatagttctagattcattcagaatcttatgtaatcttattggccatagagtggtggttccttggcccagttggttaaggcaccgtgctaataacgcggggatcagcggttcgatcccgctaggaaccatttcttggaagttattttttaccattgatgtgataatccggaggttatgtgtctctgacaacggttaatcttgttgaaatctcaataatctttcacttggatagatataagatatagactctttctatatctctagatataagattcctatatatctatatatctatatccctaatctaagataacctaatagtatacacttatatactatatatctaaacttatgtaatccttggttccttgtactttattcttgttcgttattgttcattgttgttcgttcttggttgctctcttgtactcattttggttactcctgtttttatctatgtttgtaaaatttgcaaaaaggaaagtttagaaaaatatcgtcaaccctcatttttctaaacaaaccctaaacagtaatatctctgatattacagattgagtctagtgtatttattgcaattcatgttgtaaaatgttttgcaacacgttattgtcagatagcagtacaaatctattaacaaatgcaaaaaatgcattatattaattattcgttctatggaagggaggaagcatgacataacatgtttaataaattatctaaatagagttcttttcactaagactgtttctaaaaggttataataattatcagtctgaaagtatcaaataattgtaataagatcatataattaataatttcatatataaatataccaaataacattaaataaaaaaaaaacctagcattatgatcttgtaaacaaattttttgctttgtatacggatcatcagttgttggaaacagttataaacagtattaagcaagaaaccaataatttgcagaagtaaagtcaataagtttgaaccacttatcactaaaagtatattagaataaactcatagcaagtgatggttttaatacttaaaagtttcctggattttttgttataatacataccaagtacaaatgtataaaaagattcgttttaaaaataaaatggaccttctcagtgaacatgtatatataatgaacttgtttccacagttctttttataacctaattattatagtataatgtagagcaattgaacaaaggatcaaactcatattgtcttttctttatataaagaaaaaaaatggaaattttggctcttctatctttatatatgagctttttttattcagtaacgggtggataatgaacaattctcttttccttatctagagcagttatcgaattcttgtaagacaagaacgcattccaaaatatagcaatcacattgaccgccaatagttgatgttgcaagggtataaaggaaaaatttatcatttgaaataaaggccatatagtccagttaacctttaaagtattccaccattcaacatccaactttttcttagcaacagcaatggattgaccttccattattgtcatacaacaaaaataaaatggcaaggaaattggagcaaacaatatttgatctactgatactcttagtatctgatttttccaatgtgaattatgtatatgtgaaaatcttacattgtaatgtaaaatgttataccatttcttaccaataaaagaaaatattagagaaccatatgtaatagctcttaatgtccttaaataatcataactggttaaatcttttacatcattatcggaaacaatattatagttgtcagatgatgggtattctgaatgtgaaaataataattgagcaacgacatctccaatcccaaaaagagatccagtcataatagcattagttatgtgaggtcttttcgttagtgaatgcttgtagagttctagcaatttaaacattttaactctttcttccctcttttcttacctaattccttattttcatgcgagactagaataagagaaaaaaaaattatatgctaaattctaactattcatgtctatctgattgatctcttgagtttttaaatatataaataacttgtaatctaaaccatttagagcaattcgttgtaatgtgtaattgaaaccttctttcccctgttttcttttctttttttcctattttttcttccttggtttattttacttcatcattgacgtaattgattagtgaagatgctctaaactttattccagaggctcaaacaacaaaaaccctgatagtgttgaatgctatttttaatagactacaaaaggtatgagtgggactggaccataacctggcagtaacttatcttgtctatttctgtttctatctttttctgtccccactgatcaatacagaaatggatataaccttattttctctttctatttaacattaaacttaagattgaatacggtgaattaattttataaaatggaacataacaggattataaaagtaaaagaaaatagcttaacaagtttaaatgcttaatttggaacattaacaaataatattatgcacgtattatgccaaattctacagacgaactttataaaatcttgtcaataaattgcaagaacaaacaaagatacttagccatttgaaataaaaaaaaagataatttgcattttgtatctctgtgaataaatagattatttttaccaatacaagtcagatctatagaatatatccaattatcgaactctcaaatcaaaaggtctttgtgagtataactcgtataaattctaattttataactttctttcctctaagttctacttaataatattatataaaaaattattaacatccgtaccaatcacgactcttattacctttctaagttcctaattcactaattatgaagattaattatatcttataaattattaattcagccatgcatcttacctattttcaaaaataatttagtaatttttttttaaccaatctctttcagaattacgttggttattttctacttcactatgagttctagcgatcaatactagaaactatactaaaattgatttatcataatttcgacttacctcagtctatatacgttttacttaaattacatcagctacacacaataattgtaagtacatatctatatttaaacagtgcccttatttcagctttcaattaaatattcaagatttgaaatttacacttctcaaggattttgtggaaaaaaaaaaagaaacaaaggcatatcttgaaaacaaatcttactgtggaacaataaatgcagtaatactatgcaaataaaaaataggcacattcattgtcgttattataaagttgtttagagttgtgtttaaagattaatgcttagatctctaacttcagttatcaaaatatcctaatgaatacaagatgaaagcaaaattgttaaaagacttggttgtattaagaaaagagtttcagcaatgggatcgagtacttacatggagtgaagatgggactttatactttagtactattccagaatttaccgttggccaacctttatacagtaaagatataaaacggtcaagtaaagatttatttcatttaacaagcattgactttccaataatggataataaattagaatttgaagattctaaagataatattctgttaaattctcaaccacagtcttatatcagaatgtgcaaaccttgcccttacaatagcagtttaattgctgcaataacaaataatggaaacattattatttatcatgattataaaccaattttgaacatggatcaagaaggaagaaatttacaagagagaacatatcatagtttcgcatgggatgtaaagggaaatactctagcagttgggaatgagtcaagtgagttaattctattttcaattgattattccacaaatacatattcttctaagacagtgaagcttagtgacggtaatgggtggattacaaaaatagtctggaataattttggtctcattgcagcatcttcggataatactgtgtattttatgcaggatttagataaacaagagcctatctctacaataatattaccttcttcaagattcaaaataaacgatcttttactcatgaaaaaaacagtttttgtctctgtatgcggtaatattttcaagattaatatttccactggccagagaataaatgttgcagtagacccaacttgtgaatatctatttataccattatatatgaataatgaagtgattttattatctaataaagccagtcatattgttaaacttttagatgatgatattatattacacccagataacatagtatttccatacctgaaaaaaaaacgtcaaaagtggcaagatcttggaaatcaatataacaaatatgaaatagacctttctatctatggactggccctatcattggatcaatattctgttgctatagcctatagtattcaaagagtcagttttaagtataaaattatgtcagagaataaatttaatgttatgtttattccactttatgaaagttggagtttatcttcaaaaggttctgggatgttatggtttcaaacatataatatatatggaaaacagttaccagtcacacctaacaattcagtaaataccactgaagataataatattgatactgatctcgaatttgtcgattacttaaatatgttggttaaaacatctgcaattatcaaaaggatgtttcaaaatatgattgacccagattctatatcaatggtattatttagagagtctattcttaaatatgcaaaagctcataaagataagttaattaatcctatggacaagttatgtgttgaatcattatttgaaatattacgaaaagaatccatttttgaaattaaaaatgatgatacaatagttataaaaggtgagtttatagaacagacatttaatatttttggcaatggtaatcaacaaatcattaattctatagaaggaaattcatggagaagatgttctttgacgttattacctttgttaaccactaatacaaaaatatgtccagctagtaaccaaagaataataaatataaaaaaggatatacaaaatgattatggctggttcactcggactttgctagaatttttcaatgataaaagcccgtacacaggtggtaagtttagtgaaagtacataaagaattatatcatacagtatacatatttatatatgtgtgcatgtttgtacctttttttgtaaattttgcattttctataagtgaaacggtatcaatacactttatactgtggttattttacgttgatgttcatcagatattgatattcctatacgtagcaccctattttcttttatttatcttcttatcatcaaaaaactcttttacattatgcataattgattgaactgatcgttcgggttgaattctatttttgacccaatgtgataatttgcttttaatattttctctatcataacgactatctaacaggataattacagagtaatcatttatatgtcgaattgatctccctacgctctgattaactgccttcatacatagattatccaggaaatctttaaccacaactttagggtctctaggtttcaaattaggatgtttttgattcaaatcatcaaccttcttttctaagtgtcttctcttgatctgtaattctccagattgtaaattaggataaggtaatccaaccataacaattgctctacataaattatcctgaaaatttataccttctgacaatttcccaccaacaacagcaaaaagtatagcacccttattcccattattattaataatctctgagtaatcatctaatgggtcaccgccattttttgattcataaaatagtgttctcttattattgatcctttcaagtaatccatttttttgccaattctgaataacatttgctaaaaattgataacttgggaaaaatccgactataccaccattatttggaacattatcaattaggctcataaaaaattggaatagaaaatcattgattagtgataaattatttctatttaagtaggtgaattccaaaccttgttgattaacgataaaggtttccaaattctgatcagggatgatatgattgcatgaatatttcacaatttgatcatttctcaaatatgggaacaaatagtctttgaattcatccattggttccatcgtaccacctgcaagaataacgcatttagcttcttctataataggttggaacaattcgcttggttccagtagcatgtattttattgatggacccttatcaaagaaaaattgaccctcttttgatgggtgagtcaatgaagttaagaaggacacgattttaaacaatatgggcttggaagaggttgattcatcacttttattattgcagttattattagcattactggtagatgtatttttaacttgtttttctttttccaatgattccatgtaggtattgatcttataagccactttggaatcatttatgtatttaattaaatgatagacatttaatgtatctgtattgttttcattgaaataatcaataaagtcatttattggggtgcccggtttaacgaaattatcattgatatatttaattataacatttagtaatttcaataatttcaataagttaattctatttcctgggtttaatcttaatttaaatttttgtaaatatttacttaaaccaatttgacaataaatcaaatcatttaatgaaacttctgacgaataaatattgtttattgtctcaattaggttatgtgcttcatcaataacaataatgttattcctcaaattcaacttcattgaatttcttgctgtatcagataataaatactgatatggcagtgtaactacttccacaccttctaaagcatatctggaagcataatacggacacatctttaagtgttcaccaattgttactaaatcttcgatatcatgaatggaatgataaatctgatcggtaaacggtgttgcagtatttttatcaaattgataaaagggacaaccagatatattgttgccattatttttatgtttcgaatcggtttttttcttcctatgtctcaattcatagcatgcatcattaatagcttccaaagatccccattttttaacatctggatttatgcataattgttttttagaagctaatggtagaaatttaattctttcctcctttatcgattgtccaaaagaagatggaaaatgtggtaatgtcaactgattagcaaattggtttaattgtgaatgagttcttgatgcaaagataattttaatcggattatttaaagtgtgtgggtggtttgaattatttgtattattatggaatgtatcgttattattagtaatattagtagtattattattgttattaattttgtttagtaagatttcaatttcatttgacaaaaaaatcttgtttgatggattatttttctttaaatcagtgtcttgagtaatatttgtgttattattgtcatatggatcaggtataaattcattatcttcgataactataggaatatgcttttgatttagttttcttttctttatgtaggacttattaatattattcttaagatcgatattgctaatctttgtagtagtattatcgttaatatttaaattatctaaatacatttcgaattgtacaaattgatcaattttttcactaattagacttttattaaatatttcgttcacccaatccggttcactatcctcatcgctatctgtattattattattattattattattagaagtagcaatggtagcaatactatcattattatcatttatatcattagaatgtgtattagtatcaatattttctaatattctttgtttatgatctctcagccatgttattgtggaacatataagagataaagttttcccggtaccggttggggattcaattatacatatttttttaccatcatcattaccagtaagattgttattgtaagacaatgtgtcatagatgcatttcatcagatttagttgaatatcataaggttcaaaaggatgataaaatttatcatggtcagataatttgttacctggactcattatatatatatatatttgcttacttgcttacttatttatttctattgtatggcaaataataatagaagaaaataatttttgtagattaataaatcattataattatcgccaattatatgaatattagtaactatcacttattctatgtcagatcaattgcgatgtgatagaccatagtagagggctagttatgataattatttacgaatgataaaacgacggatcaagaccattgtctctttaaatcttattttttttcttatgtttattatttgaggtgagcatattttctttttttttttccttatccttttttttttattttttactttctgtgagggtttaatgtacaaagtctaccaaaatttcagaaatataaggtttatatatcagggttataatacattttcctgtttttttgtctattaacattaaaatgtttttgacaaatacaaatccactcccctttcaaaaaaataaaaaattaaaaaattaagagataataagtttgcgggattaagagaaagaatagtgtattcttttctgatttctctttatttattcttgtttcctttttgataaatagagtttacttttcttcctctttaagaagtctattcttttattttttttttttgtatatatatgtgtgtgtgtatttatgtatcttttgttttggtacttatgtgtcataatatcatatataatactatcaaataccatattatgtcatataatattgggatttcttctcctgtttttctctttctctcttcctctccctatctctttatctccttatttttccctatgttgttttattgattaactccgtcaatagaaaataatcttttcatctgtatgtttcttattcttcttttcttgttttcccctcccctcctcttcttttccctcccgttttatttttattatctttgtttttctggtttgctgcagttcacaataaatttttttttacctattttgtaaatgacacacgttcgtttaccgagaaataaaaataaaatataagaaaaaaaaaaatagatatatttaaatggaacagtagtcggtgtatggcgttgtctattattcactcaaaggagttccggtttacaactcgaaccatacgcgttgtggtttgtgctcgagctttaggttctgcagcatgtctttgttttggttcttccctccttttgtttcttgtctttgtttctctttccccgcttagtgtttattcagaactggaattagaactacgtttgaattctttatgcttgttataacttctcccccctccgccccttatccacgtattaagtgtatttactttgtttatgtatccagttatacgtttacttatttaaactttcttttttttctttcatatattaattattcttatttattcattttttttttttgtttttctcttgaggcaaacatgtatacatctttatacaaacttttgtacttgggtatacagttggtagagtaacttaaagggttatagtacggttattagtaccatttttactactactactactacaataacagcaacaacacaaaaaaaaatttattcatcatgctattattagataaataccagaaaaaattccatatgttttcaaataagcataataataacaataataatagtaatataaatagcagtgatactaggaatacatctattgctgataccactgccgttgaaataaacaatgatactaatcttaacaacaatagctgcagcaataataataataatgtaaatgattgtacggatactagtacaccggatatgagtacttttgtagatcctagactacaatacaatatgatcactcctgtaacttcacataatgtattattctcgattaataacaccagtagtaaccatgccttctataacttacaacagccacaacagttcggctacagtagatataatggtagtacaacatctctagcaagctccataaattctgatattgcattacccatgtctgcttccttaaacaatatgaatatgaacaatattttatctaaacagtttattaatttgttgatcgatacatatcaagtattatgttcagatccaactattactcccttcgacacaaataatcctccctctggtatacttaatcgtgttggtaaactttcattgaaaagagccagctcagttaatatggaaatattcagtagtaccaccaatagtaaacattatagtaataaccataacgttttattatcgataattagacacaatttgttatcagagatcagaaaagacggatactattcaagaaatgtttctttgacttcattgatgcaaccttctctgctcaataacaactacaacaacagtatcaacagtcctttatctcaaccacccattttgaaaagaactaataccatggacagggtacagaataatatatataatatcacaggatcaaataatccaacaagtataagtacagaaagtatcataattaataataataataataataataataataatggtaatagtaacagtatcaataatagtaataatggtggtggtgggctagggattggtttaggttcaagcattcacctgaatttgtatccaggtttagcaaacagtagtaacaataatatgaataataataacaacagcaataccaatttcaatccattgttaagtcgatcattaagtagaacttcatccccattgatgacaaagacaaaaaatctttaatcacgtaatgttattgatcttacatatattggcaatggggagaaataaggaggagaaataaataaataaataaacatagtaaggacattcagataaatatatatgattcaattttatcgttttcttctgttaataacatttttttcattattcatgtattattaaaatatgataattattaattaaagtattccttataattatacatccttttattgtaatgattatgataactatttttttctttttttattcttctacatctcttacgaccaatattatccaactttatgatattaacattaatattagtagtagttgttgtatatatatatatatatatactaatttgatctttaatatacatttatatttaagtattggaataatctatttacataaagaaaacttaatgataagtgtatataattagacactgttgcttttttatttctttttgttttattatcattattattattattattattattattattattattattattattcataaacttctcgacgaggggctataacttctctattactatttatattgttaatcttttgtttgccccatgcattagttagtatcccagctttattcaatattctaataactgtatcacttggttgagcaccacaaccaatccaatattttgtacgtgcaaaatctaatttgatatctttccatgggaatgtattattctctatacttgtcttgatatcctgatttttaagtttatttttatttttatgactaatattggcacgtaaaccaaacggacgtggattataagtacctaaaacctcaattggcttgctatctcttgctttatatgcttgcgtgactacaatattatagactggactatttttacgtccaaatctagctaatctgatccttactaaaccctttgtcattttttgctccttttatcgatttttttttttttactttgtttttcttaagttatactctttatctttaaaatgtacttatatatatattggagatacatgggctcgtatgtgtacgttaatcccctttttatcttttcaacaaagtaaattaacgattctcttcctttatggaaagggaaatctaccaacatcgaaatctcttttccatttcatttctgtttcttctttatgacacccatacatccttttttgcttttgtagagattcatttaatctttctttgtttttttttttttttttttattttttattttttttagatttttcttacaatttcacgtggtttgtccaacctgcggggtgtgtggatggataataaaaaactgggtttttttgcggaatctaatcctgccaatgtttctacaaacaatatatcacaggtcacgaaactgctaaatatgcaggtgtatgggtgtttttttttttctttttttttcttttttttcctggatggcagtttgggttctatagtttgggaaaaagaaaaaaaaaaaattttttttcttttgtttcttttctaattaaacgtttattaccttcaatctcatctcgtctcatctcttttgatcttgtctaaaaaattaaaacgtataatcaccgtagggtcttatactactatactcattaacttatctatacacacatataagcattagagatatatgtttgatacacattttgtatagattatacacttctatacttcataccttaccttttttgttctcactaggcccttttaccaatatatatacaaaactcaccacaataatggacgctgatcaagtcgcccattttatggaactggaagataaattgtctaaaattagaaagcaattatcttctaaactagacaatcaaaaacatatcgctattatattaacttctgtggaggaaaatatcgaaggttacgccactaatgatctaaccaaaaatattgttcaatacattattgcatttatgactcttttagatcaggctatggatcaaaagaatcattcagttatcaatttacaattggctacttctgctacctatcttttggatattgttttccactatactccaaaatctctattgagatcaaaattcattgaggtcctaacaaagattgcgccatgtatcactgacccaaatagtgaacctcttttgattagatccgccattggtgctttggaagccttgttaatggctcaggattctcagacatggaacaacactaataacttatctattactccaaagagaggtttacaaggtttattagaattgtccttggatccaagaccaaagattagaaaaagagctcaggatgctgtatcgcaaatcctattgaatccacctgtggctcctactgcagagcatgttgcttcaacattcatcgctgattttattttgaaacaactgatggcaacaatcgatgaatataattctttatctaacaaaaaattgaaaaatgattccgttaaacaagaaatgaatggtagaatcatcagaataactaaattgattaacactgttgtctccacaggtcaatggccgtcacatttaattgaacctttatgtgactatttattagatatcattaaatcctcagagcaaatccttgtcactagtgcatttcaatgtttcgagagtttatttaattccatggcgcagttatctacatcaacaaaactggcagaaaataaatacattaatgttctcgacacaattttcgctttgaaaccatccaactcagatgcccaattgactggttcttggatcgctgtggtagttaaaggtgttaccacatattcaattcaccaacctttaaagtgtttacaaaaattaccagaaatatttaagattatgtccatatatttacagagtgaaactcctgaaatctctttcagtgcatcccaatgtttaattgcaattttaaatcaagctgttaaagacgatattttattgactcaaaatgtggatttgaaaattgtagaatccgttagtgacatcattggtcaattatctgatatctttgtggaattcttatctattagatacactcattcagctaaagaaattctaaatattatctctatagcatttcaaaaatttaaatatagatcaaatcctcacttaattaaacctttacagattgttgataaatggagaattaatgaagaaaattatttagattatcaaaaagaagtagagcaagttattggatcatctatcactgcaatgggaccagatgtcgtcctacattatttacctttaaatttgattaacccatctaatgatcaacctggtagagcttggttattgccaatcttgagagatcacatcaaatatgcaaagttatccactttcattaatgacatgattccaattgtaacccatttccaaaattgttttgataaattaccaaaagaatccgttcgattaagagtctttcaaacagtagtagaccaaacttggtccttgttaccacattttgcagagttaccaagagatttaagagagtcatttactgatgaatttgcacaagagttatgttctttattatacagcacacctgaattaagaactaccatttgtaatgctctaaaaatgttagtagaaagtaatctgctatatatagatggtgctctttctgaggatgttatattacaagaacaattccctgtggaagaagccaaaaagaatattgaatatttggctacaaaagcttctaatcttctagctgttttcttcaacatttacactcaaacatctccaaactcaagaggctatattttggagactattgaattttatttgaagattactagttcagaagatattgagaagacttttaacaatgtctgtactttattaaaagattctatggacaaaggtgctgctaattttagtaataacaatagtacaaataacaagaataaatctgttccacaattgacctctacattattagatattcttatcacaatggtaaagtatttaccaacatcatcatactttgctttattttctatattcaatgctactattcaattaccaaacaatttaatccaaaaaagatcttacagaattattagtaaattatctgaactgccaagtgggtcagatgctgtctctgctcatatcgctgctattgaagatactataattaacaattcacatactgtacaagcagcttctcgtgcttctcgtttagaggctataaaaactgtgataaacttattaccaagtgatcacttaaattttattgtgaaagttgctagtgaagttattttagctactaaggatgtgaatgaaaaaactagagatgttgcatttgctactttaattaccatgggccacaagatgcagaatgagaccggtgttggcattatcaagattgatgaagaaacacattcagccagcatctctgaattttttaagattgtttctgttggtttgattggtgaatcacaacatatggttagtagtactatcactgcctattcttgtttgatgtttgaattcaaagatattttaccagctgatatcattatggatatttatgatacaattgagttgtatctaacatctaattccagagaaattgccaagagtgcaattggatttgccaaggtgtgtgttcttggcttaccagaagagatgatgagaaataaagtacctgaattattgccaaaacttttacgttggtctaatgaacatactggtcattttaaacaaaaggttagacatattattgagagattgattagaaggtttggctacgagtttattgatcagcatttccctgaaaacgacagaaaattattaaccaatattagaaagaccaacaatagattgagacgtaaggaggataacactaaggatggtgttataccggctgcaaactctagtcgtcaattcttgtctgcatatgatgaagctatatatgattctgatggtgaattgaaggaagcatctgatgaagaagaggttatatcaagtaagaaatcttctaaacgctatattattgaaaaatctggtgataacccattagatttattagatgcagaaacattggcacatatttcttccactcaaccaagaaaactaaagaaggattcgaagaagagacttgctgatgatgtttttagtttcgatgctgaaggtaaattaatcctaaataataaagaaaaggagcaaaatgcggatgatgatgacccattaaaggaaatttcaagtggtattaatgcttatctagaagccgttaaacaagggcctgttagaggtcaaagaaacagattaaaattcaaaaaaggtgctaggaaagaagaggataacgattttagtgatgatgagaagttaccgaaggtgaataagccagttataaaaaataagattggaaagaattataagaaaacaaataaatataagtccaagagaaaattataatgatgtatatatatcttgccaatgtatatattaataaaatagttgtatagtaattgaaatgataataaatggaaatatagacattctccgtactttgtgggaaatgtgttgcagtgttggctgttcattattataaaatataccttccaatgtatttctaaaaaatattaataaaataatattcacacagtacaagttgttttacattcattgatacaaacgtacaaacgatcaaaaaattattgaaatctataaaaatgactgtatataaatacataagaatattatatgcaaactttgtctttaatgttttatcattagaaaggttggccaaagtctaatgattgtcttctttggaatgtattatccatatcttccatcgctgccagctctaaattattaacaccattcgtttcatctgtaatatcacccgtaacagatgtagtaaattggaaattggacgattccacaattgggtttggaaataatggatcatctacattgttccctatatactgttcgttaatatcgtcaccctcattatcgtccatttcaacgtcattaggatcaaccggttcttctaattgattttcattagcgtccatttctttggcactgacttcaccatatccattattatttttataatcgttttcactttcactttcactttcaagtaaatcattctcaaatgataattttatcgtatctagtctattttctttgtccattgcaggtaatttttgcatatattcttgtgattttttaacaaggatggtattttcctccaatgattctaagttactctcattatgatacgttaggtcactatttccattattattaatactactctctgatattattggcaagtaatcattgtttgactttgttggaatagtttgtagtttattgttactatagtaatcacaatcttcttttgaaaattgcagcatggaatgtaacaaagaatttttcagtccgctaacgctagataattgggaaatactaattggtaaactattttgattttttttattccaaagatttaatctttgtctaatcaatataaatttgatccaattatctgtatctccattattgagaatctcatctattaattcttcttgtttgattaactccttctgaatatcttcatcaaatggatttgtttgtcctggatttaacttattaagataatcattcatattactgtaactattcggtataatattattattggttcctaaattatcatttggaccatcctttgttggacctattgtaaagccatgttttgtagttgccatagtctcgatttttttagttaaatcagatttaatgacttcaattgggggtattgatagattttttacatattttaattgcatatcgtgcaaaaaccaattttttaatagtaataagcctttatcactcggcaaagaaggattttcgtcaaatatatcaagtatatctactggtttgatttgtcctaaattaatcattgcctgaacaatatcttgtaaagcaatattattattatcatctgtctcagtggattgtctcgccattgaaagtttatttatttctttcaacataagttccaaccatttaatgtataaatctgtaaaaatatctacagttgagggttttgccctatcaaacccaatcgattttaataattgtaacatcgaaacacgcagtaaggcaaaataaaattcatcatttacagtcatttctatttaggttttcctatgtttatgttatatagaatatttctattcttggtttctttacaacttttaacagaaaagaatataattaatggttttatattcaatgctaatcaactaatgcagctggaatgttgatcgaaagggacttcgataagtataacacaccaaaaatagtcactattcaacgatggaagtgcaactctgagtgttgttttggttcataattttctattttttttttttttaagaagttaccaaaaagttacacgaagagatttaacctttagaaatgatattgtttctttcaaaaaaaaaacaattggtgagtgaattttttttactgaatagaaaatccttagtaaaataaacaaaggaattaatatatgaatataaatagtcggacaagcttggatattaaaaaagcttcttagactaaacaactcaattaaataacagaagaacgaaagacattaagaccaattatgaatgagcaaatatatcctttatttcttcaacattacaaaatttccaatgattctaattctgtcctgtactaggaaaactacctagtttgccaaaagtatttgcactatctaatctccctttcccccctccctcctcacatatacatgtacttccaactaccattttgttgtgagtaccattttttttgtttaaggaattcaataacgtcatttattaatataccttaggatgttttatcaatatttataataaattgttactatcattatggagttggaaagcgtcttgatttaacttttgcaaattataaatagaactttctcttaataacacggcattgtgaccttcaggtttttctaactatgattcacatacaccattatctttgttgcctttatcattaagaatatttttgacttttatctgtatccacagtattaaattttttttttcatatcgaatcggtattgagctactactttcaagtttaccatagttcaaatctttatttattaataatggcaatgcaattcgaacttgaagtctaaaatttaaaaatggtatcattttgatgttcaacttttcaacaaaatgttttaatagattttttttcataaggaagctattaaattttcgtttaccacaatcataaaaccagagatctatgttagcatgggaatattttcttattggtgtcattcctcttgattttttttttcataatcgatgcatatattttattatattttgtctatcaaataaaaggtttgctgatacgctgtctatataatgaagatgaattaattcttttgttaaggttgggaatatatttcccactgccttgtcatttattaaaaaaaaaaaaaaaaagagaggaagagagaaaataatactcgatcttaatattctcttgtatgagaactaattggtgatttattgatgtaaaatatgattcgataaaaatgttagttgttgtttgatgtctgacgttatgaattatactgatgcattggtaagtattgtctgaaaagatatgggagataaatcacttttttgttttttttttcattaatacatattcatatatctgtcttaaggtcgattgatatatatcacaaaaaaatttattgtattttatttttattttttattggtattgttgaagttcagtttcgacagacagagtagtggagaatttctcactgttcttgttctatcttgaaagcgtttaaataatttgctaatgaatttttttgtcttcgtttttatattgctatatgaagaaataacgtgaaaactagtcataatcaaaattgacacgataaaattcataaaaatataattaattttgttattatatatctttgaaggtaatccaattttttttttacagaataatgttcaatcgtatcataaatcaagttatttttgtatttgcctttctatagggttgtatataagtcttcaaatgaataaatactgtctccgaaacattacaaaaagcaattttctttgatactataaaataatttagtagatgtaaccaaaatgtagtcaacttcgtcatctttggctgatcttgtttttttttttttgtggatttataaagtaagacaagtgatgttcgctaatttatattctttaaaatgcagttcagtagacaaagattatttttattgctaaggtttggtattaacttagacatggataagaacaagtttaactagttttggatgcttctccaaaaaagttataaaatgaaattttaaagctaatccattttcaatcatttttcagaaatttttttttcttcactattagacaagaataaaattctaaaaaactactggaaattctatttaggatccttgataacttctatctcacataatttatggtatttttagttttacattttcatatgttttaaacaattttttatatggttaaataatcaaacataactatttatgaagaaaagttaaatttgaaattgacttggtaaaacattaaactcaaaacacatattaaactagactatcgaatatgtcccaatgtaatagaacttttgtttcttaaactgaacttagagagaaatctttactaagaatatttcttgataaatgcaatagacaatcttacttgaaatacaataagccaatctgcaattacatatgcaaaagaaaaaaaaaaacaatatgtcatcattgctattattattattatcaggagttttatcagcagatttaatgagatatgtgaatataattttaggtcgtgtcatacgaaaattttttttatggattttcattttttattttttttttttttaggtttcgtcgggtaacttaaattatgtctttattttttttctttctttttattacttttgttggcaaggtgaaaaaagattcgagtaacaacaaaaaagatagtatggagagacacctctcacaaaaacgtgacaactgtgaaagtatacccattcattgaacaagtcttttgctgattatctcctgcagttgccgtctatattaaactacgattttagtgaactaaaattaactatatcttaattgttgttattgattatatcgagccatatttttgtctaccccttctctatcattctctttcctaattcctttggtacaaaagatcatacaacacagaagcaaagcaaagagaaaaaatagaagaatttctttatactaaactgaacaagtaatattttttgcatatactttttattagtattgataaagataaattaaagcaaacaaagaagtcaaaaaaaaaaaaatacaaaaataaaaaacatacataatgtctggtctatcattatattctgtacaaagcattttgatacttgattcccaaggtaatagaatatatgctaagtattaccagcctccaccaaacgttttaggacataaccaacatgctgctttcacatcctttagagaaaatgaattatttagttccttgaaaaaacaagaagattttgaaaagaggttaattaaaaagactcataagcaagatagtgaagttatgttatttgaaaataaacttgtattttatagagaatatattgatctaacaatttatttaatcggtgatccgaatgaaaacgaaatcattctacaaacatctttcaatgctttaaagaattccttagaattgatattaaataatggtattgataagaaaaatgttcaagaaaattacgatatggttcttttgactatagatgaaatcgtagataatgggattatcctggagaccgattcacaaacaattgcatctagagtcagcaaaccacctacaaatgacaaccaattacctttagactttgataaaggattattgggtgcatggggttttgcaaagagcaaattacaggaaagattacagcaaggtttatgaaagatattgaaataacataaaaagaggggctgtaaaataataactacactttaatatactgtgatatggaaacttttttttattttttcgtgatatatttatgtgtatgtatatatatagaaatgctagtgttattagtggttatatgatacacctcattaattttttttcctctatcttactttcatagatagaacatttattctcattacaaatatatattggaatttataaaaaatatgtactgatcacttagagccctttaggaaagttctggttcattaacatatagacaaatgtatactgataaataaatatataaattggcagggggaaataaataattagaagacaataatatgtttttttttttttaaaaatatttttcaaacaagagcgtgaaagtcggaacgtcttttctttaatccctcagtgacaatcttttcaatttcgtcaggatcagaggtaacaccagttaggttttcataaccatcctttgtaacaagaatgtcatcttcaatacgaacacctccaatatacatgtatttttctaagatattaaagttaaccatagctattctttctggatgtttgtttatatattcatcaatcaaaaatttgttgaaataacaacctggttcatttgtaaccaccatacctgcatgtaatggtaaacgtaatctcaaatatttgaaaagatcatcaggatcttcataattaggttcaccaccaacatcatggacatcaaggcccatcaaatgacctaatccatgtggatagaaggcacaagaaacacgagattctaagatttgttctacagagtactcacttttaaagatacctaattggagtaaatgctcaataagaactttgtgagataaaagatgtaaatcatcccaggagacaccaggtttcattaatttcatggtagtagattgcatatctaatacagtttcatatatttcacgatgctctttagtgaatttaccatcaattgggaaacatctggtaacatcactagtatagttgttccattcactaccagcgtcaattaaaatggaatgtttcttttcaatatcttgatcattcttaatgtagtgtaaagtaccacaagctggacctgaacaacaaattggatcgtaacctaatgttttagcgccttgtctcattgaatgatattgaaattcagcttgaatttgacattcattattttcaattggtagagcagacatgacagccatatggttgatatcagtaatatgtgccacatgtcttagagtttcaatttcatatttatctttgataagtctacaagagtctaaacttttgaaaaatatgtcagcaccaaatataatcttttctcttaaacattgcataccttgttttaagatggtttcacaatattccttatcagtggaatagaaataatcaattttaaatagtgggttctttggatcagtgaccatattgtggaaatcgttgacataataaacataatctacatcatatttttctttagcctcttctaaagataatggcataccactccacataatgtcttctttgtcaatatcaggcaaaaataataataatttagattcttcaatgttgtaaacaataaaagaacctgggatatcacaaccagataaatagtaataatatctgtcttgtctaaaaggttttacagtatcacagtattttcttaattccatagattcaccgggaactaaaaatgcaacattattcttttcacaagatttgacaaagagctcagcaactctttcattgtgtcttttggcaggatatttgtgatccttaaagtattgtggaacctctaaagaagaagcagttttttgactcattttaatattacttctttttattaatttacttccagtccagtaactgatagcagaagtggctactgcaattgataaaggattcaaatatccagataaatccataaggtaacaatgacttgatactaatatatacaagaatgaacaaagtaaaaaaggagtaaaaatccagaagatgattaagaaacagtgtgtatacaaatgttagaaaacaatgaaaaaaaagagactatattttacgatgaccataaagtaaagctcaaaacgtgaagaagtggatctaaggcactaaaaaattgaatggcatcacgaatattttcgattccatatcttccgattgtgctatatatattatttatttgtttatttgtctacattctttttgtcagaagtcgcaaaacatggaagacacaaaaaaatgtgtcaaagaaattttttttttttacttttttttttttgtaaaaatcatgagagggggaattccaaaaaaaaaaaaaaaaaaacatagagtactttttttagggtatcaagaaaagggtttgtacaaaaaaaaaaagagtattctaaattggttgtttcttctttttttctctgaaaccctagtttatctgttctaaaacatattcaaagtttgtgatgaaaatcatctttctaaaaaataatttttgaaatgttctattcttagccatatagagaggtctttactatactattactatcatcatcgcattctctaccaaattaggaaacaacaaccgtctactttctaatttacttttatcctatcaacaaaatagagtatatttttctataactttaggatgcactaacacctaatttgtttctcttttcctttcttccttcctttctttttttgaatactcttacatatccttgtgtaacaagaatgatcatctttcatacttataatataaaaaatttacatttttttgatttactgtttattaaatatatataacgtatataagtgctttcactttttgcgaagtgttcttttttacagaaaaaaatgttttctaaaccctaaagtaaatatcaactttttcagtagatatgtttgcaaaccctacttttttcaggaataagttaccagtctattacattattttttaattttccggccttaaacttgtctccttcttgagtgtaaaccttatcttttctaaataggggacttttttctttcaaagtatacttttattttttttttatgcgagatcgagaagattaaagagcctgcagtatgatacgagctatgaacaatatactgactaaaaaaaaaaatggtagggggggtcataggtaacagagaattattgtggtagttttcaaatggacatagagaagaaatactccatttctgaaagcatgtatgtaagaacaaaggaatatatttaacataaaagtcattagataaaaaccatgatgagaaataaaataaagaattatttggaaaatgagcaggaaaacagggatattacccctaagtccaaacggataaagacccaacatgcctacgacatagtagaacttaaaagaaacataaatttacaaaaattagaccttgagttgcctgtgtactgttctactaaccattccacaaataatatttattgttgtttacagtgtgggaacttttttcaaggccgtaatcagtactcgcctgcatttcaacattcaatcacctcaagaacaaatactacaccacacaatttgtttgtcaatcttcaaacaacagagtttttttggttacctcaaaatatcaaagttaatttagatgaaattgataatgatagtttaaaagctttacttatacaattgaaatgttgtataaaaccaacttttaataatggtctgataaaaaaaatgccttacaactgttatactttaatcgataaagataaatatattacgggattcataggtataaatcaatcacattcttctaatttgtctataggacatattaatgtcattcttttattattagcacatataaagcccattagagattattttttattgaacacaaagatggagaacgagatatcaaataatagattaataaatattgtctctcttttaatacaaaaattatggtcaccagttttactaaggccacatatttcatcgtctaaattaattaataatttgatgattgaacataattccatatttcttaaagacgggataaataataataatccaaggacaattctaaattggctaattaacaaattttctaacaatgaaaataatagtcccttaaaacaaattttaatacaatcatgtagaggccatctgatacagtttttaaagacagaagaagtgaaatcaatacctttttggaatattactttaaatctaccacgtctttcctactttaaagatggtagaaatgttaatgatcttcttcaagttaaattagaagatttaattaaagagaaattttattcaagaatgactgaaaatgaaaagaaagaagagaatgataattctaataaattgttgcctgactacgaaatcaaagttttgcctaagtatctgattatttattttaacagatatgattctattttaaatgggagtaatattaaacaggaacaatttccgataaggaatagaaatcaaacaataattgagtttccaatgaagatgtgtttaacttcaaagaatattataaataatcaagatcaaatattgaaacactactatagattacaaagtaatatcataaatgaagtaaaggctaatgcagatctatccaaagatgatataaatcattggaagatccaaatatataatgaaaagaatgctcagtggtatgaaatctgtgatcttaaaaccactttgattgaagcagagttaatgtttttaaaagaaacttatctccaagtgtgggaaagaatagaataaatacattttcaacagatattatctatactttattcttatataatatgtacatatattgcttattaaatagctatagaatcaaccccagatgttaggacagatacaatattgtcctctaataatgcttcagcaatatcacttaaatgcttctttggatcttgtttccctacataacgtgtttttaattcggattctgtcaaagtcttttcttcctcaattcttttagaatattgttgtgcaatttttaccatttgttttgtggctttcagatttttatcttccttaatttgatagtcgtataatttcaaaccagactgccattgttctttatgtaaattcattaacatctttgtttcagctggagtcttatgataatcgatatttaaagaatagtaatgcctatttagaccatggatcaaggcttgaatatttggtttattcattaacccaacatttgatgttgtttgtcttggttcttggttatttattagagcaccggtatcgattaatctaaaggcatcgatgacaaccttgccttttacagattgaattggatcgacaacaacggccacagccctactatttaattgttcaaaagatttttgagtgttgacatccacgcttgacaaccaacaaccgaaacctggatgggaatgataccaaccaacgaccatctgatctctacctgtttgttttaacatatccatcattttagcttgaaagacatcatctactgcttcaacagaaacaccagtaccactctgaggcatggcaaatacatcaacgacattaactgtataatcatccacgaattcacctaacatcaatcccataacttccatgggcacacctgctctaccatgttttaacatctttaacaaagcaatcgaagagatgtaaatagtttccttagtatcatctttgtcagtatcagcacctggaacacctcccatcttccccatggaattcatcatcaatctttgcaatctttccattttgtattattctaaatatatttgtgttgtatactatttcgttccactatatgatgtcttggattttataaacaaataaatgttcagaacttgatttagttctatgttattaccttttgtagcaccccaccactagtcatacatgtacacagacctaataaaataagtttgatgttatcttttgaaaatagtacaccagactactattctttaatcagtttctattaaaacgatttggacttttgattattttttttgccacttcatcatccggaattggtatttccgtatatcggaatgcttcccgtgcattctattccgccatttgttttttgccccttattactttacacccacacaccacattcttggagaagaaaatactacttctatgtggtgtacgaatgcttttttttcttttttttctttttgccaaaaaaaggggggagaaacaatcaatgggtgtgtgggtgtatggagctacactgtaagcgaagcgtctcatttacttaaaaagattttttttatgtcatctgatttaaacacaatgtaggtgaattgaaatgagcttttggctatcaatgagtaaatgcaaatcttaacatcacatttaaattacacagagaatgcctgcgctattctatattatataagtgtttggtattatagctagcatctgctacactgacccatttagattacatctgatttatttctgttctttttttgttttatccttttttttttattacaatatacactgtgaagttgtttaaaataaatctgcaaggcgaatagaaacacgttcaaatatgtcctatggaaatcgagaagtggaaggttcacaaaccatttgtctgcaagaaagtacacctgtgttgactctccgagcaacttccaattctcgagatgataatgctgataatgataaaaataaggaaaaagatcacaataatgttcgatggaaacaagatgttatagataatgagcatatgaataagaagaaaacgaagatttgttgtatataccatccacaagagagtgacgaggaacaggaagaaaacactgaatcagatggtcatcttcatcttcatcgtcacaaagatgacaaagaaccttctgattcagactctagttctagttctgaaagtgataatgataaaggtttgaataaagaggaaagacgtcaaagacgaataataaggcgtcgtgaaaaattaaataacgaaactgagtataagactaatgcatatgaatatcaaccgaaatacccaaataaatcatcattaaaaaagtagaagtaaatagagaataagaaacctactaaatcatttattttaattacacccccccttcttttgttattaaatctaattacaactacaatagtaataataacaatagtatttatgtcatacaataatatttatatcagtatatatacatatatataatatatcctgtgatttatttgttgtttactttacaatgcaatatcaatctgaattaatgtgctatatgtttctctaggcattttgtattggatcataccagcgtaaatcatacaatttctagcaagttttttcattaaattaatttggtccatcttattattatcatcaacatttgaaggattatttggattagatcctgataatgtaacatcattccggatttggttctgtgaaagagatgattttaatctttgaataactttattcaccgaaatcatagtaataaccaataaatttggaatgcatttcacaatattaggatcaattaaattaaattcctctgctttttttctaatacttatctcttcactaccgctgaaatcatcacctatgtcttcatgattattcatattatcattattataacgactattttgattcactactagcggtaaaatgtttaattctataattttattcaagatttcttcccattgtacaacatttatatggcttacctcatttctatcaatagaaatgatattgaaagcattgttgttatcaaataattttctgatctctactatctttaacaacaataaacatgtttctttatttttaaagctaataaccgacttgttgctatcatgtctgttcaaatgtatatcgatcaatttttctgctaacaaaattggatttgtttcactattatcattaatattaactaaaatgttacaagttaagtcagaatcacttaacaaattactgatgatattgttgattatcgaaatgacaatatcatattcttcagctaattggtatagtaacaaactatcgtaaactctaccatcctcgtcagctttcaaagctgcttgttctgtaatcactttcaaaaatgacttgctatctgtctcatcattaatcaacaacaatgatcttctttgttctataacacctggaatacgagatccattacgacctatttttcctaaaagaatagtgaattctttagtttgtaatatcaattctcttatacattcatgcataaataatgtttgtaagtcattcttatctcctttagaatttaacccaattaataataaatattctaatgcaattctaggatcagaatatttatatgatctgatgtaagacgtaataatctttataaaatttatggagacatcactcttaccatttgctaaattattatcgtttttatgtacaattaaggcggaggataatgggtcattactaacatttaatagttgttggttacaaataccaattgccagatggaccgcatctaattcactgatcttgtatgcatactcgacagcatattcgaaaagaccgctcaataacagaatttgtaaataatcattattaaatctttgaacaccgtatgataagataagttgttgaaattcctctaatgtgtagtttttgtagatggtatcattaacaacgatctcatttggcaacttactattatgaatattttcttctttaatcaacataaagtgaatccaaagccaatcctcaacgtttaatgttatttcagggatcgatttctttgtcaaatcacatcgaccaatgattttataaacagccaatctataaggatcaccattcaaagagttctttatatgttggttgtattcattatgcaatctagtcataaattcaacaggtaattcattgttgccattagatttagcatgaatgtatgccttaaaataagtaataaatgactgttcaatttttttaaaatttgacctattatttatcataacatctaatgcttctttttccataccagctcttaaaagatagaaaatcaaagcccaaattggtgttccatttataatagttaagttgctaactttccaaacgtcaccagaagatgtactcgcatttgaagtggtattatgtaacactaaattatcaatgtttgtattaatactgccacctgggctattttttaacttcttctcaatgaaagattttattttgttaatatttgttggtaatccttcatccatttcctttttatataataaatcaacatattctttaaattgactttgtaagtattttctggcattagtaatgactagattattgcgagaaaaggtagaggaatttaggttaccagaagcaattgacattttgttcttaacttcctgaaaagattcaataattttccatgattctaataattttcttgatttcaaatcatttgaattattatttaacaaagatataaactcttgattcaaaggaaatttagtattttgttgcctagcattattaaatctatgaataattttggcattcttttcaaatttgtcccttagcatataatgttcgtttacgtttaacttagaaaaaccgtcattattataattatcatttaaaagatcaatcccgtctaatctatttccagtaaattttttactccagaatttcatcaaatcatcattatttaagattttatccgattgaattgattttaaagagtttgcctgggttgatttttcgccaaccaaaatgccaaaattttgtttaataatattctttctttcgttccaatttaaatttagattgtcattaacataatcatcaaagtcctttgcagcattcgataatagcatttcaatagaggctaagatattttcgttttttttaatttttagataattatcaatctctgtaaattcaaccttattacctgtagaataagcactggatgcaagatcaagagtagtcagttgaacattggtaccagcagattccatcaggacggttgaagcaacattagattcagtagaaatagaaggaatatttctggttaaggtagaatttgatagaatttggttttgttctaatgcttttaatgaggtatcgacttcatcaaattgtaatccactgccagccaataagtaatgggcctttgtatggtcttcatggggttcgtgttttataacagatccattatgtgtggtattagttgtagcatgtgctcttaattcacgagctctccgattgatttcttgaatggataactggattgaacctaaatcagaggaggtggttggtagtgctttggatgattccaaaaggctgttaaacaattttgaggtgctatttttttggggttgttctgaagagattcctccgtcttggtttttttcattaactatattgattaaggtcatccttgataaacctttttttataggctgttttttttagtcttgaatctgataatattctagagataacttgtatgacaaaacagaacaacgaaaaccagaaaaactagcctcccaattataaacaaactgcaaacaaatacacatagttgaatcccattaataatagttaatcaatgttgtttaacaaaacccatcgaaacagctttagaattttttttcttaatttttttattaataatttaagttacccgacgaaacctaaaaaaaaaaaaaataaaaaatgaaaatccataaaaaaaattttcgtatgacacgacctaaaattatattcacatatctcattaaatctgctgataaaactcctgataataataataatagcaatgatgacatattgtttttttttcttttgcatatgtaattgcagattggcttattgtatttcaagtaagattgtctattgcatttatcaagaaatattcttagtaaagatttctctctaagttcagtttaagaaacaaaagttctattacattgggacatattcgatagtctagtttaatatgtgttttgagtttaatgttttaccaagtcaatttcaaatttaacttttcttcataaatagttatgtttgattatttaaccatataaaaaattgtttaaaacatatgaaaatgtaaaactaaaaataccataaattatgtgagatagaagttatcaaggatcctaaatagaatttccagtagttttttagaattttattcttgtctaatagtgaagaaaaaaaaatttctgaaaaatgattgaaaatggattagctttaaaatttcattttataacttttttggagaagcatccaaaactagttaaacttgttcttatccatgtctaagttaataccaaaccttagcaataaaaataatctttgtctactgaactgcattttaaagaatataaattagcgaacatcacttgtcttactttataaatccacaaaaaaaaaaaaacaagatcagccaaagatgacgaagttgactacattttggttacatctactaaattattttatagtatcaaagaaaattgctttttgtaatgtttcggagacagtatttattcatttgaagacttatatacaaccctatagaaaggcaaatacaaaaataacttgatttatgatacgattgaacattattctgttattgagtggcacaaatactaactgtacaaatatcgattcaaataataataaactatatttaggcattttattgccagtaataaattcataaaatacctctaaaaaaattaaaaattctgaaaataaactcaataatcctttaagattaatcaattttggagatttatcaaatgatatttcacattttagcaaagttagtgaaaatggtgacgtcttatataaaacatcaaaaaaaaattatgtaagctcaattctattataaaacaacgatattcataacatttcttttaatgatttcaacaatataaatttcacaacaaatttcttgaattatattaatcaattgttaacgatgcgtaaactatataagaatgaatatatacagtataaatacttcacttcctggagtacaaattggctttttttaactcaatcttatttcagatatgtgatgagaaaacagcaaaaaaagcatgtatgaggctgtttgtggagtaaactatattactttttttgtataatgactattatggaaattattgtatatatatgtctacattttacatttttgttgtaacataataaaaagaagtttatttatttaattgcatatttctttttttagcaaattttagaacgatttcggttattttcaaatgtcatgcattttttcatgaacttattgtttttgttgcatctattgtcgctttcgtcctgaacaatggtcctatagtaaaatgtttttttttttcattgtgaaaggacccaacccatgtcctttctgaacttcgaaaaagtgtttttttgactgttttaatagaagaaaataaggatttagaaaagggaatatataatattatatataaaagacccataaataaaaggatatatatgctatgtcttgtttaaaaagaagatcatcctcatttgttaacatacatatcaatatattcatcaactggcatttcaccaaatttatcccctaaagatatatccaagatatttgaggtacgttcagatttattgaaatgttgttccaaatgattagtgaatttttgtagtaataatggaatcccttctttacgtcttaaatggtgtccaattggataattaactaaaacttcatctaaaattgttccatccttcaatttcacaagtaatgcattagatattgcacgtttctttggatcatgataatctttagttaattgcttgtcaactttacattccatcttgtctcttaaaatgtcaatatctggattacttaatgcaatatcatccatgtaatgggttgcctttagttctccatagattaaaggaatggcaaccatgtattgaatacaatggtctctatcagcataattgtgtaatggaccagatttgttgattatatccatagcagcttgttgggtcctaattatgatggattcaatatcagaataagttttgcccattgaatctaattgttttttcacaatcaaagcagcttcaacagcagtctgagcatggaattctgctggaaaggagatcttgaataaaacattctccataacatatgaatcaaaggttttacgttggctaaagataaacggtttaccgtcatttaagacgtcataaaacccccactttggagcagataagattgatgggatatcacctaattggctcttggtttgtttgaccataaatgctattttgactgctctagaaacagcatcaccagcagcccaagacttacgagacccagtatttggtgcatgacggtaagttcttaaagattgaccatcaactaaagcatgggaaatacattgtatagtttgctcttgagtaagatttaataatttggatacaacactagcagtggctaatttcactagtaaaacatggtccaaaccgtgagcattaaaagaattatctagagccaacacaccttggatttcatgggcctttatcatacattgcaaaatatcatttatggttaatggcatgccttgacccttcagattacgattaatataatctgctaccggtaaaataccaccaagattatctgaaggatggccccattcagaagcaagccagcaatcattgaaatctaaccacctaatcattgtaccgaaagtaaaacttccattaacagggtccatagaccaatttgttcctggaatttttgcgccacatggaatttgagttaactgttctggcattactggggtcattacttttttagccaaagggaaatttaaagcggcaaggccacatcccaaagtatccaacaaacaccatttagcagtttgaatagcaactggagaagtaatatcctttttgtgaacgtaggtagcaatgtcctcaatcaatttatctgtggcaggtctttcattaagtgtgcaggacattgttctgttagtatcagcgtatgatcttttagttaaaatagtttttgtaaatttgctagaggctgagcgaaacattgaaatttaaaaatacgagttagttgaggttgtggatttcgaaacaagttaaaataagaagaaatgagagcaacaaattaagaataatttataaacaactcgataatttaaacatacttacaaatataaagtaatatatatatatttatataaataaaaaagtattcaaagctcataaaattagactaatgggttgaattggtcgattaatcgattaatttgtttgttaactattccaggagtaattaggtcagcaagggtatgaagatatgaccgagtagagaatgcctcataaaaagatacatatgatacgcttatttcttgattatcaaagttttgaaaattttttcaagtaattgaagtcaacgctctttggtctttcaataggcaacccatatatcctatcccaaactaactgtgcacagggacccatggcccttgaacaaccaaagatgacagttataaaatctaattccttcatcccataatgataaaataaaactccggaggcactgtcaacgttggggtgtggatttttacattttccccactcccctaaaacccgaggcgcaactctagacaataacaacattaaatttacgtttggatcatccttaaattgttcgcttctttgattaacaaaatcaagcatagcagaaaaacgaggatcttcacgtcttaatacagcatgaccgtagccgggaataacatgatggttgtttaaaacagaccataaataatcttctacttgggtttcatcttttgtgttttctacttgtttttgggtctgtaacaaaaacttaactacatcttgagctgctaatccatgcaacggacctgctaaccccaataaaccagccgagtaacttaacattggatcactcaatgcagatccaactaaatgtgttgtgtgtgctgatacattaccgccttcgtggtctacatgcaaaccagtatacagtcttatcaaattggtaatttcttttgtgtcatctttgtcttctttcgttgttttattacgctctttacttaatagacccatcatagaggtcaaattttgagcccaatctccactaggatcaaatttacatacttctttttttgttacattgatttgtaattccacgataaatcttgcttgctagggatggtaaaaaggcaattaaggtcatgacatcatcaaaagcatcttcccacattgtcaatttgttattaactccacgagaataattatccctaaattttgaaaagtaacttaatgttcccacaccaatggaaaattgggtcattggatgcatggttgcaggtaatgagttcataatactattaacctcttcaggtaaataagacgtctcaacagaagagttagaaataacaatagtattccattgttgtatcaaactattaacttgttttttagttggaatttcaccggttaataatagccaaaacatagcttctggatagaaaatgttggaagaatcttcaggacctggcaacaattcctgacattcttgaattgtatatccccaaaacttgatgcctttgattggatccagtgtggatgattgccaatataataattgacatcctctcatgccccctaatatagatcctacggtcaattcattgttaggtaactgaacattttgtaattcttgtctcaatttttgaaattcaattctacgttggggtactaatttttttaaggtatccttaagtgtagtctgggcagaatttcttcttacagtagtatgtataaatcttctcataatggctctaaataggctaacttttttgttatttttacccttgtgacttgttctagtcttatctagtttttttggtttacatggtatatagcaagaatgaggcagagtagtactatacatatccagttcaatgaataaaatgatatgctctttatatatgcgtttgcatttatttcctttttaatattaatagctgtacatactttgaaaatataaaatttgttggagtaaacagtttctcttgttcttttgtttatattattattattattatcactattattacttttatagtttaatatagcctatatcatagctatatgttattgtacaatcaatgtgtgaagtggggaacttttaattaatctatttatttatgcaaaggaaacagatttttttttaggtttatcttgtttatctttaatttcattagcttctctcatacctagtcttttattctttctacgtaatgatctagctaaagatgctttattcttaatttcattctttttctcttctaatttctgtaattttgcttgttctttttgttcaatttcttttcttttaacttctctgatttcttctagacgacgatctttttcaatcttcgattcattaatttgatcatatttatcaccaacagttttaaccaatctttgccaaacaagtgtatcattatcatcaataaatttcttaccctttttaccacgtttaattttgataccaggtatgatagatctattcaagttaggaatatctttgctttcatcaattttaatttttgagctataatctcgaccacgtgaaacagcttttttaccatatagtctaatcttttgttgctcttttgcagtagcaagtttactaaccttgtatttttggttttgtttagcctttaataattgttcttgacgtttcgattcacctgatatgattgtgtcatttaactggtttcttgatatagaatcagcaaacacttcagggcgtacttctctttgtgtagattgatacttagattttcctttcttatactttctagctaccatttggaatcaattaaataaagatatattatgataaaatataaaaatatgatctaataaggtgtatggagattatatgttcgtatagataggaattctatataatattttattcttcctaaatgttgttttcgtcttttgaatttgttaagatacaatacataagatgacatatattaatagctattgatgaatacttctttatttttttaagctcatcgatactcttatattattttccttctttttttccaagaaaattttcagtgaaaaataaataaaataaaaaagaggaaaaaataattcttatagtacgagacgataagacaatttaactaatacgaaaaagataaagagcaataaaataatttatacaatactatacatattattttatccctaaaagtatcagatataaatatatatacgtatatatccaatattaacattattttaatttagcaagaacagtttaaatatcatatgatctttgtaaaaaaatcatagaagagcataaacattcattttaaaacacaatcctgggtattatttccttaaggttcaatagttagactttatgcagtgttaaaaattaagtactgcatgaagagttacttttaaatctctcaatatgtatgtttataaagagggcatatgtacggtcgtaaataggagggcttacgtgaaggtaataatactttatatctttttttttttcctggtatatttttttcttttgtattttcttgaaaagttggaaaagaggagaagcaacacagaataaagaaattgaggttttgaaaaaacagtgatgtccaaaagaagtaattcttgactaaatttagagtaggcctggaaagaaggcacatttaaatctggtgataattttaagagttatcgaatattaactattttcttcttaatttggtgtaacgacatacagcaatgacgtaatcacttatagatttttcttgctgaatatcttttactgtatgttacatatatatttatttacaatccaagaagataaatgctgttcggtaaatgtgttcccgtattagagttatttttgcagatataaaaacatttagtagttggttttttgttcagtgtttactttataatagaaatctacttcacttttagttatatctaacagaaaaataacatgaaaataaaacattgcttggatttataaaaaatctgtcctactctgcattttattcgcttttttacataattcctattttctgtcctgatattttcatatataaaaatagttattaatacatatgagtttcgtaaacaattataatatgagaaatcatagatctgatattaataagtgtcatcttagtgataaaaatgataacaattactcacataatgtgtcaacattagaaaacataggtatttctcagtataataaaaaagacaataaattaaataaagatcttgattattttgattgttatggtgacaattattcatgtataaacatgaatactactacgaacaatagtgttaatcatattcatttaaaatccattttgaatttaccgtctcaaaattataatacacgttcctcatgtcatattcatattcaaacacccggagttttcattaatcaccaccataataaatctattaggaagacaccagtaccaaaggaatgtttttttgataaagatgcgtttagttgttgggaaacgtatttccataatagtaatactatcaataatcgtgaaaatgataagtttaaattggatctgggtcaaagttctactttaaaacgaagaaatcttcataaataagattacaataaatatatagaggagttatctgcatttgttacgtaactaactaatagatgtttatttgaaccaaaaatgttatctttttgaagagttgttgtttaatttatctattcatcatcttattacttatgtgttccttttgtgtgtcctggctactgtggttagatgtaaatggaaatgtatgggtgttaatctttatttttttttttttagtcattcttttttcttttgagaagcaggaaggagaaatttgagaaaacgagtcagaagaagaaaataagactcaattatcatttcattttatttttgtggaatgttcataaatataaccccaagatgcaagcttctcgaataacaataaaaattcaagagaaccccggtgtactttctgtatttgttggattgctcttgatcttccagaacgtactgatattttaatactattgaatatattcaattattttacgctttcgctagaaagatatttcatatacttcaaaacgtctatataactgtagatcaatattgaatattatcttatattatattcaaaatgtttaaattacaatcaaaaaaaatatttaaaataccttatttgacaactaaattttcaaatagatttgcttctacattgacatttctggaaactacctctaatgggaactttacttcgtcatccttaagcattttaactgcagcaaaagagttgggtaatccaataattggccttgtgttaaatccaaatttgaaacaaaatcaagttaaatctttatcagtctttaataaattattattctcaaatgatgctgcttttaaagataatttaccagaagtcattacaccattattatctgatctaattaaaaaagaagatatatcacattttttgattgctaataatattctaggtaagaatattttaccacgtttaggtgcatatctagatattcaaccaatttcaaatgtgatcaaaatagatagtggtaataatactttttatagaccaatttatgctgggaatatcatctcccaagtagaaacccagcaacctattaaattgttatccataggtacatcattgtttcctgaatattcaataataagcgaagacattgtttcacataacattaaagaattgagtttattaaatgatggtactaaagaaaatattcctcaggtaattgatcaagaaaattcagttgttgacgaaaataagttgatagacttaacttgtgctaaaattgtcatcgctggtggtgcaggcttaaagaacaaagaaaattttaataaactattgtacccattggctcaaaaatttgattatgctgcaattggggctactagagtggccgttgataatggatattgtccaaattctatacaggttggtcagactggtaaaattgtatctccaaatttgtatattgcaataggtatatctggtgccatccagcatttagctgggatgaaagattcaaaggttattgtggctattaatcaagacttagatgctccaatatgtaagattgcagattactctttacaaggtgacttatttaagatagttccagaattaactaataaattgtgaagcaagaaaatgtgaaggaatatttctgtagttggttattatcataaatatgcttactatagttagtctttttcttttattgatgcatgtaaatatttgtttagaaatagatattcacatatgtattttttcaatggaagcagaatgctataaatttatatgaaatccaaaaatgtccttgtctgttttgttagtgttcactattataatcttacaataaacatatctttataaagttatcacatttgtgtctttacttttttatattcaactactgctctactaccttgtcttatctaagatatatagtctgtaaaaatctttgttcttcagtaaaatagagtattcttcataatattagatagtataaatatttataataatatatagagttcgtaatatatattctatttaaaggttagttagctcgtatactataatggttttagtctttttctaactacttatatctctgtgttctaatcatttttcaattgactaattcggtagtttagaatataaataaagctttttcttttacaaaaagtagatgataataaaacttaaaaagcccgagttgttatttttcaaatataatatctctattcaaaagaaatctttatttaataacagaacaagacaagaaaactgaaaacgtaactcaacattgcagtctactaatagatctagttctattgaggggaaaatagaattaattaagataccaactacaaagtacagcaaatatagtataatcattaaaaaagtcatacataaaatgattttttatttctattctgtaataaaggaatattagaaaaaaattcatatacataagatattatctaccctatcacatattcatagaggtactacctacattaaaaatggatttgaactctaatttattgcaaaataaatcatcagatattaatgtgtctcaaaattatgggactgaccctcacttaacattaatcaacaataaacagtcatctgctttaagtgaggataggactgattttaatttaggattgaataataatgtttatgtcagcagtattaataatgggtatttccagacaaggtttaaaacattaatttactatttaccttgcaccgcatggataactacatatggttggttggattttgttcacgattttgtagcaggattatccttagcttcgtttcaaatccccctaagtatttcgtatgcatcatctttagcacatgtagatttactatcaggtttgtattcattgggagttacaccttttgtgtatgctatgtttggttcaactccttcgatgattgtaggcccagaagctgccatatctttggtaattggtcaaaatatagaatctataacaacttataatgataaggtaactgctattcaagttacaacagttacaactttcctagtaggtttaattttatttttttgtgggataataagattagggtttatgggatcaattttgagcagggctcttctaagaggatttattggttcagtcggctttgtgatggttcttaattcattgattatagaactgaaacttaataaattattgagagatgtctcagatcattataatacaccatttcaaaaaatcatttttttaattaaatatgcccccgaaaattatcataaaccaacatttattttcagttttattgtattattcattttattagtatcaagagctttgaaaaatagattagcgaaaaaaattaaatggattatctttttgccagaaattttattagtaatttctgtgatgtcttttatttcttactgttatgacttcaaaaaaagatatggtatgtcaattgtaggtgattttaatacaaatggatttgatgaattcaagaatccattatcatcgagctataggcaattaattccatctttgggacaactctctactattgtagctacccttgggttttttgaatcgatcactacctccaaggggttgggtggtattaataattctgttgtatcatcaaatagagaattaatagcattgggccttatgaatttggtgggttcggcctttggtattttaccagcatttggtggctatggaagatccaaaataaacttgaaatcaggtgctagaactgtaatatctggggtctttatggggttaataacgcttttaactacaaaatactttttgccaatcattcattatattccaaactgtattttagctgttaccacaacattggttggattaacacttctggaggatatttcaaaagatattttattccatattcgttgttatgggtacagtgaattgtttgttttttttttaacgatagtttgcactttgttctgttctattgaattgggaataattattggctgtatgtattctattgcatctattgttaagcattctgctaaatctaggattcaaatcttagccaaaattgaaggcactaatgacttcattaatgttattgaatgcatggatgttgttgattatgtttcagatatcactttggataatcttgaaggatgtttattaataaaaattacagagcctcttacttttacaaatgcagaggacatgaaggacagattagatagagttaaacggtttggttctataaatgcacacccaggttctaaggaaatacgagaacaaaatattgactatgtcatatttgatcttcacggtatgacttatattgattcttcagcaacacaaatattatatgaaattatatgtagatatcaagaagagaaatcatttgtatttttagtaagaattccaaagaaaactgtgataagagaaaggcttcaagaatctggtatttttactttgttaataacacatttaaacatattagaaacaccaaattttcagactttaccatttgatccattttctcttaatagcgttcaagaggccttgcttttggttaccactattaaacagcatatgaatcagtgtagagaatcaaatgatgataatagtgtattatctaaaatcttgatgaattcaaatctggtttagtatgtctattttgactacaatcagataggcagcagaatcattttgctaaaacactacaatataagttagaaaaagtatttacatatatatttaaataataaaacctattgtatataaagaataatagaaagtatagtatacttaattatcttctagtgataatattatagcagaagtttttgaggttagttgttgtaaagaaataattttgttttaaatataatgattttttacagtatcacataatgtatatattaataataatttatatatataataaatttttgatatatttagtatttattctatataacagtaataagtatatttggtattatatattggaagtagatagattttttttaaaggaattatttttttttgcattttttattatcattattatttttcagtttcaaagtgtaataagccattaggtaatattcactgattcttaagttacgaatgctgtaatttaaaagatatgaaataataatttaaatattataacaaagtagtatgaactgcatactttgtaaatagtcacttttatatattaaacaatataattattatataccaaaccatataatgtttatgtacatttttagatatcggaaactcttttattgtttctatcctagctgattacatattttttaaaatacattttaatgaaaatttggtgaaaaaaaattttgttgaatattttccaacaatgagaaactattcatagggctagaaataattcagaataatttagaccttactttactattaatactctcttctgcgatgaaaaattctgacaattacgttaagcaatgattaggccggccattcttttctatgaaaatacaaagtaatatgctcattgaataaatataatatacagaagtaatagtttataaagtgtaataagaaaaactcttgtaggtttttaaacaatttaacctattttattcgaattataataattgatataaattgcaaaatatattgggttttgttatgaagaattttttattgttgaattattaatttttgtagaaaaaaattatgtgcagcaataataataattttataaaactgtattttaaatattaaaatcaataaaattttttaaaacttgctaaaaataaaatgtttaagaaaataaacaaacatttttctattatattttaatatatacatagacatatctaggatgaattgtataataacaaaaatattaaaaaagtgtaaaaatttgaatttaccgatattttttataatataggatagtagatatgttgctaataaacatatcttataaatcttttattatattcagtatctactaaacaagcgaaacttaatatatattacaattgaattcaactaggataaacaagatattcctttacaaaatctattttatatatttactttttttatattccgattctcatcttttatagaaagataaaagattatatattacatcacacaaaataatatatatgtagctattgaaaaattttttttacaaatatccaataattaaccagatagttgcattaatatttagtcatttctaaataacaaatatttagaatattattattccattcatttcattctaaaccatcttattttagaaattttatatttgtttatttatgttttagtttttattttctaatagaaaattaaaaagagttattatattaggaataagcgttatttttataaggtttttttcaattgaataggtataggtttgcgaaaagtattttctattgtaaaacaaaaaaaagactatatatcatattataatttaatacgtagtgtaatattcacgtgttatagattctattatattggatattttctatgattttttatatttattttatattttatttccgatttgataaaattaatatgtattttcgtcttatatgatagttttataaatttttaaattttataaaaatataattagtaaaaaacacagtatataatgttgcacacaaagtgttttgttgattataattaggtaagtcgtatgctgtgatatttttatttgtataagaattttgtagaaaataatatgatataatatatgctctctttttttgtcttttatgaagggaaatatttttccacaaatcttgttaaaatatggatagtatgtttattatatttctttattaaaaactgttttttattatatcatcaagaatgataattaaaaagaaaacatgttcctcaataaaaaaaatatttacgaggagaataaaaaagatgaatgattgatttgtatttatgtatagacataatatataattatgcatattatttatagaggatctcaataaatcagatattcaaatcactaatagcttgagttataaaaacagtaaacacaaacaatattattctgtacaacatctactggtgtagaagaaggaaaaagtactgtaagaacagcgattatttatttaatgtagtcacctctttttaatttttgatgagaaattgaaaagtaaaaaaataaatgaacatatatatattttgaagttcatagaattttcaaagtcattttaaaaaatatatttctttttgcattaaaaattttatttacagaaaaagaaaaaaataaaaaatctttatcattttttttaaatacttgcacattaggtatattatcttgtataatttgtaacattaaaacataagttatttaatcttatttatatatttcagtacattattttataatgataaatgacaatatttacactagcacctatgtaaagccccagctatttgtttttattaatatttcttctgtttggaaaaaatacattaaactataattttaaaaaatgtttgtttgttttctggtaagttatttacggttgtaaaactaataatgttaaattaaataaaatacatatatatatatattattattattccttgttcagacaggatcttgttaaagatgttttttggaaattctcaaatattcaaaaaatgaaataaagaaaatttattaaggttttcatatgtaacaagacttttattgcaattaacgagaagtatctgcctttctatagattaactttggggcaaaccatttataaggagccctaactggaaatcctaaaataggtagtatgcgggtaacgcctaatgtcgaggcgaaggacttggaacaaccgaaactttgggcccaagattgtgaatgtattcgaacgaacatatgattatccgatggacattggcggtaaattactatgaagtttacttaagacacccttgattattgagagatagtaccagaggtaattattagcattaatatttgtattttatttaataggtttaatctaaagaagaacaatatgaattgttgagaatgagtgcctttattcattggatatatagtaaacattctcaatattatattaaacagatttagtatacaaaattataataaagttcttcgctctttttctctatatataacatagaaataataatatacaaagattgtaaataagataaaaataatgtatgatgaaatccttggctttatatatgttaacatttagccactttcctctacgaacagtaagatatttaataaacaaactcgacaacctttggtgacctctcaacaattattactcaacaatttatcgtttagtgtctgctaaaatcttattgttctatctatttcattatagaacattttatttcaacatgaataactaggactaatctatttaataattagaatcaaccagttatataacatgtaagtgtttatatttataattaaaattcatattttagcatattacttgagataactcttacacaatatagtgaatctttcatattatattttatgtttctaaatattattttgtttttgtccaaaaaagttttcgaaagataaaaaaaattacagaaagaacaaaataacacagacaatttgaaggattttgagaactatgtaaactgttataattagaatatgttgaaattgaatgttatagaataagtagataaacaaattagatcttaacaaatgtaaattaatatcagaatgcagagaatttactattcgcttatcagtaaatgtaaatataacatattgataaaagtagagctatttgcagacaacatattctcactataaaaatacataaaatcaacattttttttatattatatttcttcatttgtgtatcttttatacattatcatctatatatcacatatataaaaacaacggaaaaactttaatataattttgtacactataactgtatggctataataattgagaatacgtactatttacctaataaatacatgcgctaattctcaataaaatattatgtataaattaggagatgaataattgaatatcaatctatattctagataataagagtatactaccctagtaatttctaaccacaatgaatatgagaaatatctttatatgcaacttatatttactcaaaacataaagataaaacaattgttgcataaaaataaaaaattttacatatttgaggttcaattaaactgatatttgccatgatttcatgtaaaattactatttgaattcaaagtgtcttcacacaatcacacatagattctcttcatactatatgatgttttttctaaactcttggtttaaaataactttaagctgtaattaacattttatctacattttgatatatagtaaagtatacaagagaaagcagctcacctattataatttcaataattaaaaaaaaaaattataacccagccaagtatttaaaatgctatacttcttgacttttttaacagcataatagaattgtgatactgtacaattattctgaatctattctaagttcacattaagaaacttatcaattaggtcaaatcttttaatttgtgaagtttccccaaatagttttttattttcttttttctttacttgttgaaacaattactagtaaatccattcatcaaaatatctgtctattccaaaacatatattttctattaccagccattattcttaaagggaatggacaaattacccctgttttaagaaaacaaataaaacaaatattgctatataatcaaagttaatccaaataacatattgttgacaaatagtcagaaaatattgtttaaaactacgcctctcacttctcacacgttatttacttcataataccatctatcatcaaacattaatcattaattttaaaaatatatattgcaatcgctcatgtaggcaagaaaatatgaaggacctttagtccttctgtcatacgcactacactataaagtctagaattattattaccaaacattagttcacataaatatccaaattgtttattttttttgcaaaaacattctacaaatatttacaatctagtttttgatatcaacataatgaacctcaattaattctaatttcactcacactctcacaaaatgataccttactttaatatattctattttttaagtaaaaaaatggacaatcaataacctctctataatagcaacctataatcagatttagcatcttaacttaaattaaaaatatgaatgtttattaaaaacattatattagtccttgacatgaacttcaatcatgaagttcatttttaacagaattaatttgtaacacctttaaattttcatctaactaagtagatccctttagcgttttattggctgccacctattctgcttctatggatgattttataatcaagaaatcttcttaatgctctataacattagaactgaagcatatttaacaatatatccacatattaatttagtatctagtagtttacatatgatacatttatgcatatataaaaaaatagttcttttcattcttttgtttgtacattaaaactctcgtcttgatgatatagatatagattaagatcctcttggcaatttttacataaatctcttttgcctgctttaaattttttaataaaatagataaaaaactttgcagtatctaatctttcagtatttgtaaaaaacaccagtgcacctattaggttttgaaacaatgtaacattatccgatctaaaaattcattgtaataacttgtgcttaatcagaaaggaattcatattgaatcttccaaaattaatctagttgttcctttactctgcctaatgtttatggctaaaatttgtccaatttgtccatttttcttattttatactcgaataaaaaattcttgacttaaggtataaagactaatcgacttaagaatttaaaaattctataaccatatctatttgatgaattatcctattttgttttgctaaaagagttgggaaatatttaacttatttgtatctggctaacggtgcaaatataatattgtaatcgatattctccttctaagaaaatctgtaacttacaattattgcattatataagttattgtcttttatcataaatactaactttgtgagaattattttttctgtctaataggcgttttacctgttcaaatgtatctatgttaactaaagcattgtattttatcttaaaagctttaaaacctaatcatttatctctccttttagacgattgttagataatatttgacattatactagaaaacccctacccaactatatgtgatagaatcagtcgtgatatgcttttctaaaaaaacgatgaggagttttgacaattccacatgtcactacaacattatcgaatcaacataatggtatgagactgctagataaaataccatattatataaagggaacaaaaattgaagtaacctaaatagtaaattgacatcagtattgtttatcataaagcagagttttggggaaaatattaaagaataaacaaacaaattcatattttacctatgaatacgtaagtataatatgcaattataatagtctatctagatttaggagtaaagagcctttgtaatttttttctacaaatactaatttttcttagcaaagaaatattttcattttaatcatgatcattaaggtctattttaccttcaaaattatcaatagaagaaaaaaataatagagataaacttcttaaaatgtattactttagtttataaaaaacttatccgctaataatactttgtatcttattgaaatatttttgtagatagatatccaggataataacatcatcagattcatgagcttcatagatttttttaggaaagagagaaacattaaagtcgcaggaaaaaatagtgatactaattaatattccagaagttaagttaatattaaagaaataaacgtttgaaaaatcagtagtatatcttgtgatagtagcttatcatagtattcaaattggtaaataaatttaacccattgtctcaaaacgatacaaacgttatttctattcacattaaatatacacagtttaatttcttgtcatatttaccactattcctgtataaagttcatctaatttgattctaaagtctgtatacaacgtgttattctcagaaaaaaacaaaaatattatcactaaggacaggttaaatgtacgtgttgaaggagattcaagattaaggggaaaataattcatacaaagaagtagtctggattacatgtccctaaaaagaaaataaaaatcaacacaccttaataaagcatccaactaaatattttatggagataattacttattaaaaacaatttctaagccactatccacattaaagtttttcttgtacattattacatatatattactattttatgtcagagaataaaaagaccaacatgcctaatttgcctttaacattaattcaaagcttcttatcatatgatatatctatcattcttattctaaccgtagaatttctttatataacgtttgcatatttcaaaatctttcaactgttatacccagtcataattcactaagagacaaacaaataaaagaaataatctcatttgaaccaaatacaattgcaataaaatattaaatgactgataataaatacactaaaatttgatcgtagaaattatcaaaatatcaatatgactatatttttatcgaagataatccagctgaacattatagatcattaaagtaaataaggttttgaggttgagtaaacagtagataaattcagtatcttaatgtaaaatgtggcctaatataaaaattataatgggaagaataatattgatactacgctttagccagtaatttctatagaataataataattctacattcccacagccacaagcataagatacctatcaaaggtctttacaaatatcaacaaacacagcataatgtgtgtatcatttctatattccttattgggcataatcaatatagcaactattaattttcataaaataatatcaaacaaaaaagtagctctaaacggtgttggattgtaatagtttaatattcttctataaacaggtcgctttaactccaatggatgtgttagtgctcaatcaacaaccaaccgaacctatttatacataattctagattttctaatgaaaaaaagtttcaaaccaaaatcaagttccatattttttctttttcttttttctatttaacaacaatgaccttaaaatgaactgacagaatctatatagatgtttttttaaaaattttctttaagatttatagaaacaaacattgatcatatagtttttacaaaaagactcttaaaataatatactcatgtaatagtaaaattcagcaattaccagtcactctttgatgtaagaccattatcaagaagtctaacttatggcccaaccaatattacgtatttgcatatgtatatggagaattctctaaagaactatgcaacattttttcagaggccttctctaatgtatccactatttcttatattcttcttttctttctttttttttcttcaacaaaagaataaaaaaaaaatatatcgaataaaaaaaaaaagaaacgtgaaaaaatttttgtttctttttttttcttttttcttttttttttgcttccccgttttccctttcttctctctttcaaatctaaattataggaagtccctgatatgtaataataaaggtgaatagctgttctttaaggaagacgggactttttaaacagtcacacaaaacatattaatgggaaaataacaacctagtacctaaataccattctgttaagtaactcaacacctattaagctatttatcatatattcctaatctatactatattatttcaatattattatcatactacacaacataacattccatcctattttattatagctatatatatatttattaacttcacctttttattgttttaaaaattactcatggatcatccaagaacttccagtattgccactatttcaagtaatactgataatacaacaactgtttcttctattgcttcgatgatgaatcaaactgataattcacctaatcaaactgcaccagcaagtaataatacacctaactcttcaagtataaatatatctagatcttctatctctaacacaaataataatgctaatagaagaagtatcgattcgaatgataactccaacgtatacaagacctatgacaataatactggcaatgccaatattttgacatcagagccttaccattccatggaattacaaacaaataataatacaggtacaaacatgaatttgaattctaatacaattataaaatttgacacttctcatcagcaaaataataaatcgttatctacaaactttcctctacattctgaaaaaactaaaaacgatgctaatatactacataatattgaaaacgatttttcatctaatttatttaaaaattatgatccaataacaggtgaattcttaggaaaaaaggaaagaactaatacaccatctggctttatacaaaacggttcgagtgttaataatagttccatctctacatgtgcacatcaacaagacaaaccagtaccaattgcaacattattatccactccaatacaccctgatccactttcaacaaaattaccaccgacatccgacaagatcatgctcacagctataccaccagcattgaaaattttaacgactatgaagtctagatcatattcagtaccgacaattttacattcctcaatgaaaaaattgtctaataatcacgttatatatactcactcaatgagtgggaactcccacggccctataaaaaataataaggttacaaaatctatttacaacagtggcaatacaaataatacaaataatcacgaaatcattaatccaggaagttggcgtcgtcactatcaacaacatcaacaccacattattacctgccagagtaaccaacatagtaatcctaataataacggtactttagctacaaatgtggtcatccctttagtaccacattccaaggcaccaaattctacatcttcctcaaatatcaacttaaagataagctcaaattcaaattctactgcaaaatcatctgcacagaaaattgataaacaagaaattattaacagcaatatactccctgttatgtctgttcaaggtactagaacttttgataataaagattctgtttcaccaaataaaatacgaagggataatgatgagtctttaatatcaaaagacagaataaattactttattcaacaacggtctttgcaattgaatatgatattacctccaatcaatttacaatgcttgaaagaaatagatttacaagagatagtgaaaaacccacaattaagacatgacatcgtatttgatccacttttacaatttcgacccaatttagatggtgagagggggattaagaaaagacaagtatgggataaatactggtatgatgttgagaatgaattaattatttatatgaatcaacctaatatgttcaattataaccatacaagattagtgccgttatttgataccttaaaggaaattctactcactattgttccacaaagagagtctcaacagattgaaaatatcttggacacagagctaaatgttcaaaatctagtgaaaagtggtaatgtttggttagctatgaatgatttagcgtcatggttagcccaattatttaagcaccattgtgctccaatgagagatacttgggtagacaaaatgaaatgcaagtttgataatgccaaggaaacacaatcaatgacagaattgatggatggctttaagtctatatttcaaattttagaagcaatgaaattagatatagccaaccatcaaatccgactattaaggcctgctatactgagtaatgcggtagaatttgaaaagcaatacttcaattcattgatggaaggaatttctttaagggaggttaataccaatgaaaataatattaatgatgatagaaaatttctgttaaggtcatcattaatgtggttcaaggataaattcagtgagtatttaccaacgttagaaaataataatatgaacgcaaaagttatgattcctcaagtttacaaaatttatattaaatcaattatcagtctattatcatgcaacaaaatggtaagagagtatccaacctcattatcattcgatcatgcaaggttaatattgctaagagctgatattagacaactagtttgccttcttgtatgtagattacatttccaacaattagtagccagtgataaaaatatcgatccaccagtaaaaaagtatatcttaactaattatgacaacaacaaattacaaaatgaaatcatcagtataattactgatgaacatggaaattgtagatggacaaaaaatacattatcaatagcaatccatttgtgtaaagtgattaaagatttaacattagaatacaatgctcacaataaggataaatctgaaaatttggcgacaagaaatgacattgatgaaagtggaaacaccagtataaatgaatcctcgatgttactatctaagaaagtgcctatattggataaccaaaaaatatcattttctaaatcgtggctatccaaacagacgcaacctttgagtgaaatatatagtgttctagagaaaagggttttttctttgttagaggagacaattttcgacaacgctgaatgtactatggatggaagagttaatcaagaatttgtatactcgtacaatccaattatttcaactatttcgtctaacaacaataaagaattttctactatggaaagggttataaatcaaggagagactagcaataacaaattaacatcgtttagaactttgaagaagaatttcaaaactaaaactagtaataacattatggcaattgctgatatggaacaatttgaaaacatctaccgccatttaaatacaattatcaatttccattggtctgtttttaattcacattacattgacatggtatcagagagtgttcaaactatatgagacatcttatacttatcatatttatttattcatacatacatatatatatttatatgtggtatcataagttttattaaacaatacccgttttatccgggagatatatttaatgtattacttcgttgtaaaagaaatcttttttataaacctgaatcgttttaaaatgaaatgatgtcttaatataaaatttatgtatttgaaaaagcaataatttatgcctactctctgattgttcctcttctcaaagaataactaaatttgtttttttgcactcggatcacaatgctcaagccacgttatatggaactaaagtaaagacaacaacaactgttgaaggcttataaattattcagtaaatatattttctccaatgtttaattttgaaatttaagaaaatacctttttgctaacaaactatttattgtataaccttgctgatattaatgtaatttaatagcaaacagtagttataagacaataaagagtatatgataatattgaatgactactacagaaaatctacaaaaaaaaaaaaatagaaacaaaacgctcaagaaattataacaagttacactcaaataaataatatcctaacaaaagaaaaaaaatacaaaccagccacaagaagtaatcaatagcaacaatgtacatagcaagtattttccatgttaattttaacatgcaattttatagatatatgtacccatgaaaatatatatattgtgaaacatcaatgactctttagagtctatataatatgtagctagactcaatccttataaaaatagataaacaaacaaaaaattaggacagatttcaactaatttagtcttatcacacttgctaccatttattttatcttatgctttgaactgaaatagaactgtgataaggaagaatgaaccctttacttttttttttcatgtttttgacttctatggaagattcggcattttgctaaaaaaaaggctttttcattctccgttttccgttttcggattttgttctaattgacttaaaaattacaacaacaacaacaataaaaaaaacggaaatacaaaggagattacaaataaaaaaggggtttttgggtgtggatgaaaaaaaaagaaaaataaagataaagataaagataataaagataagcgaaagattaaacagacgtcaacttaaagatggaattaatgtaaacaagattagagtcacgttaacacaaaccgaaaagccaaacaccactctaaagtaagtagaaatattggtattaaaatctttccatttactatttaaagacaaaaatttgaaaaaaaataccaaaacctcaattataatatacgcataaataaataaacatagcgaaaaggaaaaaacctttttttttcaacacacttcaccacaaaaatctgtttcaatttaatatgaaattcattgatgaattagatattgaaagaatcaatcaaacattaaatttcgagacatctgattgcaaaattagtggaggatgtgatatttatactacaaagcctgttgcatctgacaaaaaactctacaaaagaattgatcatcatttggaaatgattttacaagaaaatgaaagttataatgctgctgtacaacaacatatcctcaatgaagtcaatggatatttatcttcacctatattaactggtaagaacaacaacagtaacaacaattatgatgataattctacagtaattgctcattctgaagaggccgtcgattttcataacagtagaagaagtagtctttccttctgggaacaaaagagaaggatgtcaatcactgaaccaataaacaattcaaccaacaatagtgggagtgttgtcaacagtcctttattatccaaaatagatataaatgattcaaatactaatcttatgcacaatcacgtgacaaaaacatctaagttaaatgatcaaaatttgaaggaattagttatgaataattaccagaatctagtgaataaagataatgactacctaagttcctcatcaataaataaaaatatacaaccaaagaaaagacaatcatcttcaagtagtcttataagaagaaatagtagttccagtagtttaaagagcaattctaactccaactctaacacccctgtattaaagtcaccaagattaagaagatcttctctaaatgatataaataacagttcaataaacatcggtccgtttggtccaattaacgaaccttcaagcaggagaacatttgcatatcttattgcaattttaaatgcttcttacccagatcatgatttttcatcattagaaccaactgacttcacaaaaagttcattaaaatcatttatttctaaatttgaaaattctttgtattcaatgggtaagcaatcaaatgaacaagattggatctgggagataatcaacgaccatatgacattgtctgactgcatagtataccaatatagtccctcaaaatctttcttagaggatgaaccaggctatctttggaatctaatgggattcctttttaatagaaagagaaaaagagtggcttttatatacttgattgcatcaagattaaacagtgaaacaccaattaaaacaaattatgtagatgttgatacggggcatggattaacaagttctaatactaatactaacaacgacaacgactatgataatgatgaaagtggttcttattttactttttcaaccaaaaagtcaaaaaaaaatatagatattttaattgatgataccatagaccaatatgagggagaatatgatttaagagatgatgaaaacgctattcaagatgattctgaggatgacttttgaataaaatacagatataaaatgaagtaaaagaaaagatagaaaataatcactcatctctaaaagtgattattactttacttagcaagtaaaaattaacatgatttttttgtcatgttatatattagttgagtatgcttatttacttatttattctttgtatgtaatgtattacatttatctcttctattgtaatcacttaaaaatccagtaccttcactcaataatcagtatatttttgatcttcttatcctactccttcttttatgcagtcgttgatatgttaaatttctatagctttaataccttgctttgtaatagcatatgtaatagatttgggctcacaatatgatgaaaaaacaacagtcaaatctctctttacttgccaaaaagagctctcatcaattccttgataaatttttaattcacctcttttaatcatgggtgaagccttatatgattttttcaacagtattcttgttgaaacataattagcccatgataaacctaaattaggtacaatagaatccaatctccttttttttcttattattactgatttttttttattaattttctctttggaatattcaatatctgctgtatttaaagttaaattttgtttagactttcctatactattcatatcgctcatattatagttaccattatcatagttattgttaggatctgattcattattttctaatgatcgtattgagagtgctgattctgagacggatttgattctgtttgaagcctcaatgaatttattgacttccttttctattaacatagaatcttcatcatcagacaagatggtctctaactgaaatgaatcaacctgactaaatcttagattatcactattagtattactttgatgtaaatttttagaactatctttataattcatggcaccattggacatagtaaggttacttgttgagatatccattgaattgtatttgtgtctatacaagatactggaatccttccaacctactaaccatcctacttgataatcatagtctgtgataatctgacgaacaggctcggcattttccaatagcggtttattacctacttgattagcgactactacagataattcgtatttgtttgctaagtacaataatttttcagctaatctttcaacataaaatctattgacttgagaatttttaattgatgtattttctaattcaactcttagatgatgtgatatagaatctataataattaatttgatagaatctttattcctatctaacaagataggtaattgaacatcaaggatatgttcctgagtagttaaatcattgcaggtcaccgtgaagatattatctagtgatacattttcgttattatataaagggttttctgctaatatttgttgtattctttgtgtagtaagatcaccttcagtagtaatgaagacacatttcccattcaatccataattttctaaaggtagttgcactgttaaactcagttgcattaacaattgagatttaccagttgaagattcaccgaaaatttcagtgattcctcttataaatattccaccacccaatatttcatcgattttaatatcaccagtagtaaaccaagctgggtttgtgtcctcacttgaaataaactgtgaatgtaattttacagaattttgactatgaagaggagttaaaacattttgggatttgtattgaccattaaattcatctactaatattgattgaaatttattaacttcgactactgatctttgtaatatctttgataattcagatatattaagagttaaaaaatcgatagttgtaacattattcttcttagcattatctaacaactgagaaaattcaagttcatataataacttactttgaggtaattcatcatagagatccattcgacttaatcttataaatgaccaatatattgaataataaataaaacaaataaataatatgattaaaagttttcctgtttgattcgatattacattgatataaacgattggtatccaatctcactttaattcacttcatttcattggattaattcactttccttattagatagacaacatcaagtataaattcagtagaactgatgtgtgatcccgcatagttctaagtcaaaatacatacatacagtcaagtttcacaatattttttttctgcagatattctctttttttttttattttttcccttctaaattcagttattctgcaataatgaatgaaattgttaactgaaggaccataataacataacatattataacataataaaagtacacttaagttagataatatacaatataatttaagagtcatagaatttgcagcaatatttccagcaagtctataaataactttaaggaatgtttctacaagaatatatatatatagatacatacagatatatcaaagaaaagatagacgggaaaaaatagtagataaaaagaagtttgtttaggaataatgataggaaaaatgggtatgatgaaaatgcattgaaaggggaaaactttttaaagattattaaactaaatatgctgtagtgctctcaaaaatgaaaaaaagtaaaaataaaaacaatatcttggtctaataagtaaagaaaggagaaataatgaactgaaagaggaaaacaaaaagtttactggatgaaaataaaaatcaaatcaataaacgagtgaacaattttttaattaattttctttattgacatttgctttaatactagtcttgttcacgtgtgttgatattgtcgtctctgatgaaaattgagaagtctgtgaagtagcgtattcttgtattccattattttgatctatatgatttgcttgtgattctctagccaagggattaccctgtattggaggagacatattatagtattgttgtgctgcaaaacttggtctagtataatcaacctcattttcatgtacaaccgctctactaggtgtctcgatatttatagtattcttattaatccatgcagatgaaacagttggagatgacgtaagatttggttccaaaggtggaggtggtaaatattctgctttagtatttgggtggaattgccctctttcatcatagtaacctaaatcattaatatttgcctcttctgtatattctggcacataatcttctactgcacgttgtgtagttccatggtactgttgttctgattgcctatatgaaggtggtgtgatccatgaagtacctctaattggtgcctcacccctattgattcttcttctatttgctgtaaaagttaagaaaaagacagcgaaaaacccaataataaatagaataaacaaaatccagcgtccccactgccaacttgaatcaccaaatacatcattcatagccatagtatcaccatcactattagtgttagtatcagagtcatctcttttgtataaagctaaaaactgtgaagatatgtcattaattagagatccagccaccaccgtagatttgtttgaaaaaattaataaatttaaaagtatttcaataataatgaaatgtctttgtaacaatatcattttgcaggttagctatatggactacaaattcctttttttacgtatctgtacacatatgacaacaatgtgaatagttttgatgtattactcatgatcgaacagctgtgaattcgtatatacatgtacatatatatacacatatatatcttatctttgttgtataatatcaaaaagggaaaaaaaaacagaaataggaacaaaaagaaaaaagaagtggaaagacaaaatttaatattccctttttttttttctttcttttgtctgtttttatttttaatcaagatcgatcgacattaattagaaaaaaaaacagatggaagataaaactgcgttacacaccgtctaatgctccaaaaatctacatgttttgtactaaccataatcagcattcaaaggctggatgccattacgagttctcatatacatgtattgttaacgacatttatcaggtggaacaaaaataaaaaaaaaaaaagaacagaacaagaaagatactttcagaggaatgaggaaaatgatatatatatgaaaagtacgtgattatattagacaagaaggttctattatttatagatattagtataatttcccaacttttattttcttcttgttaagattgagttagttaaaaactctaatgcagatcttgagtctgattcaggcaaagcctctcttagattctttaaggctttatctctatactcacgagccagctcataagttttctttgcaccatcatatttgtataccaactgtaaagctctttctacatcgccaggcaattcaaaatttctttcaattaaatccccgagacttggatcctccttccatgcaaataagactggagctgttgatatgcctagtttcaaatccacattagttgtcttccccatttgtttacttgaacttgtaaaatccagcatatcgtcaatcaactggaagcatagaccaagatttttaccgaattcatagcatgattcaatgacgtttggtttgacaccagataatatggctgcacttcttaaagacattgcgattagagagccagtttttaaataggatttgtgtatataataatcgaaggcttcgtcaatcttactgatactagttgactttttacctgtgtttggttttggatcatattcatcggtgttgtgtaattgcataaactcaccttctacaagacttgcaatacaacttgacataatctccactacctggggatctcgtaatctagatatagccacagtggcccttcctaaaaggaaatcaccagccaagacagccattttattggtaaagaccacatttccacttggcttacctcttcttgtatcagcatgatcaataacatcatcgtgcaacagggaggcagtgtggatcatctctacaatttcagctaaacgtctctgtcttggaagaatcccattctccttgtcgaaagattcaatattattatttttaaaggataagcttgcttgcgtcaaaggatggaacctagaatgttttatatcagcattagtgagaccttgaaagatattcagtggtgtaaatgattcgacaggttgttgttttaaccattgaatggagttattcaacgaggtggttatgttatcatttgatagatacggaggtatttgtcttttatccattggaatttcacttagtgcacgggataataaaaggactaatagaggtctaacttttttaccttcggtctcaaaataatagcttgatacacgatccaaatatgggttaccagtaccaattaaagcaatgatatttctaacaagattattcatttcatttgataccagagatattggattattcaataatgactgtggtgtgactaacttactcaccgcattcaaagctactgcaaaggaagatttatatcggcatgagtttcttgtcaaaaaatgaattctatttaacataacgaatggagtataaggggaagagctagtagtatatacatatatatatacaaatatatatatatatatatatatttgtatatatgcaataaagattgtatatcaactcaaatattgtacaaaaaaaaaaaaaacaaactataatattttttctgttttgtttgttttaatttagtagctcaattaaatattggtaattagtgactttttctggagcttctaatgcatactctcttctttttgcttgcattcacatatatatatatatatatatatattttctttcttgtcctttgccctttggcctgctcgacagacaaagctgctatcttaaaacttttttttctttttttcttttgttgcatggcagtttttcagtattattgaaactgtttccaggatgaaagaatgggaactttagactacggctatgaaagagacccatacatcacagatctccaggtctatatgtgtgtgtgcaccggttggatttagggtttgtgaggttccacgggccaagggctttcaggatttttctaaacgaaacagaaaaaatgtaagaaaaacaaaaaagaaattcagtaagaaaattcagatgagattcgtgaatctgtcgctttaatatggtttttgttggttgctgcaacaacaaaaataatgttactacaacaaaaaattacttctactactagtactactactaccaatcaccaccgctatcagtgagaagagagaagagagaagatactatttatataatgtttttaaaaaagttgtttgtctcttctcattctctttcctgcaaaatcataacaataatctagacactaaaaaaaaaaattaaaaaaaaagcaaaagatatatcttacaacatatatacatacatatttataggaatcatggataataataataataatactgatactaataatcaaactcataaggacaccacttcctccaatgttttcaaattccccgggcacgaatacagtatgtcattaatcaaaacagtgttttcaaacgtaataaagacatcaaacaacattccacaacatattggatttatcatggatggtaacaggagatttgcaaggaagtcaggtatctcgattagtgaaggtcatgaggctggattccacagtatgagtcagatcctagaattatgttattcatccggtgttaaggtagccaccgtttacgcattctcaattgagaatttcaaaagaacttccaaggaggttaacaatctaatgaaattggcacacgagggtataacacagttatgtgcaaacgggcaactggctaataaatatggagtacgtatccgtgtcattggtgatttatcactcttgaatacaagtttactaaaaaatattgaaatgacaacaaagatgacacaaaataataaaagagcaacgttgaatatatgttttccatacacaagtcgtgaagagatgttccattcgatgaaagaggctattgaattaacaagcataaatgaggaaaaaggaatcgatgctataaaagatatagatgaatcagtaattgaatcacatttgtacacaggaaaattaccacctttggatctgttgattagaacaagtggtgtttgtagattaagtgattttatgatatggcaagttgttaacccaagaactcatatagaattaatcgattgtttgtggccagaatttggtccaatgaagatggcatggatcttactaaaatattcatttaataaatattttacatctattgaaaatgaagatgaagatacaataataaataataattgtaccactacaaccacaaccaaccgtaatactactgctaatgataatatatcgtcagtggactcatttttaacaaaaaggaaaagaagagatagagatcaaaatatcagtcatccatctcaagtaataagaaaggagaaacttcaatgaaaataagcaaacagatgtacaaatgtcaaaatggctatataaatagataaataaaaaaacataaacataaacacacacatacacatatatataccattagatagataccattatatatttgttttgacctttaacttttatagtatgcttacagattggaaaatatacatatatcagaattttcatttctatatatatctgtgtgtgtgtgtatgtatatatatgattgtctatttttttttatttttttttttttgggcggctaaaattgacttttatatatatatatatatatatgacactctttatacaatcattacttcttttctatttttctttctgtactcatcatgaatcttcgaaacaattttggaatgttgaaaaagtagaaatgagaaaaagaaaaaactaagagaaaaacaaaattgtttatgggagagaaaaaattttttttcttttattttttttttcctttttttatagaagcaaaaataatatgcgatgagcttcttcaaaaatcaagttcaaatgattattcgtttatatgtttgttttactgaaaaaatatagacaagtatcctctcacgtatatttctgtatttgcaattcatccactactaactattttgagctcttcatttgaacggaggttttatacgtggagaaaattaaaaataaaaaaataaaataaaataaaataaaagaaagagaaaaagaaagaggaattaactatattgattctcttgccaaaaactattttctttttatttaaaatatatataaatatatatacaacatcacttcaatcctctttgctatagatcattatggtaaaaaaagaaaatacaacaaaatccacaaaaagatttaaatacacgtcttttaaatctagaatagatgatttaaaaatcgagccagctaaaaatcttgagaaaagagttcatgattatgtggaaacctcccattttttagcctcttttgagcattggaaagatatcaatttaagtggtaacttcactgcattcgtgtccgaagttgaaccaattattcaaacattacctcaaattttataccatcaaaatacgatttaccaaagtttaattaaatatatcgccaaaaacgatgaaaaatcattacaacctttacttgatctgttatcacaatttgttcatgatttgggtcctgattttatgtccttttacaacaaaacaatcgatgtcttagtcaaattactgaatgaggttattgtattagaagactccaatgtatttgaatggactttcaattctttggcttatattttcaaatatttatccagaatccttactgagaaatatctaattccaacttttgaccttttatttcctttattgtcacattcaaaggattatttatcccgtttttctgctgagactttatcatttttaataagaaaatcgaaatctgataaattgacaaacttcgttcgttatattttcaataaattagccacatttttacattcaaattccttgtcagaaaataatttatatgatggtttattgaccttatttacagaatccttaattacaacttcaggttcattacattctaaaaccaaaattattttaagaatcctattaaacgagacattaaataataaggagaataataatggagaaaaaatcatcacattaatctgtgatatatggatggagatatctagacatgcttcttatgaaaatcttttagaaccaacaaattgcgttctagaaatattggaaaattcaacagatggttataaccttatgtcaatatttttgtctactttactatttgcagagagcggtcaaaagatcccagattggagtagaatcacaaaattgataacaagatttatggatcaaattgtagaatttaataatagcaacaacatcaaagataaatacttagttcaaccagatgttgtatctttattgtttattctctatttccgtaattgtgatattaaaaacttaactcaatttcatattaaattatttaatttcattttagaacaatattctgatatttttttatatttctatataaatgtgtgcgaactggtatcagaaagattggtttcgtttaatggggttaaattcttacaaaattttatcgacaagaactgggaacaaagttccgaaaaaattgcactatttcttttggatataaacaataataataagactccaattttacataaatttcaaaatattacaattccaacaaaatttgcagataatcttttattatacttgtcaaatattaagaaacaggatgatctatttcaaatttattggagactatctttattgtcatatgtttttgagaaagataactacgaagtgctattacctctattgaagttattaacagaatcattttcatcgcagcaaaatgaatcagatttcttgattgatactattggtatattgattggtaatatgacaaccaagactgatgatcaaatacttgaagttttacaatacattttacctcatttcaaattgttacaaacaagttcatatttcattaatggattgcttcaattattacaaagggtaaatggtgatagaaaaaatgagatatctcaattttttgctcagaatattcaaaaaaatgaagataaatctttattgcttggcttaacagataatttaataattcctgatagtaatatgcgggttttgactttgaaattattaaacattattatggaaaaatttcaaaatataactctcccacaagttgtcaatgaatgtagtcttatagaacagattcctttaacgttgcagaatggcagaattttgacagctaggattagatctatgggtgaagtattcagcaagattgaaccaacagaaattatcacaaatattttcttgaaacatttgtttgggttattaactatgagatttgctccaatttgggaaggaattcgtgaaattgtaccaattatttatagaaaaaatgcttctttaacatggtttttactctatgatttcttaaaggtaaatgatattaattatcaaataagctatccagataattcaatggattacgatgtcgatggtattctttggaattctaaaactcctaggttagaaaatatcttacaaaatattgcatcaagatgggtgaaatatacttgtgtgcaaaactcgatcatggatattgctaaaaatggaagggcacaattgcagtaccctccacatgtaagagcagagactttaaaaataatgttactagttccacagttggttgaatcaaattctagaaatatcgttccatttttgtttaatgaagaagaatttggatctatttttggtactgatgttcaatatacagcaaataaatggtcagatttagagagaaacaacttacttagagtatttgctaaatttaataactccaaaaatatttataagagtgaggcagttttccaaagattattagtactattaagtagtagaactgttgaagtgcaaaaattagctttagctgctatattaccttataaagtacctgttgttaacaaatttaaggataatttgagaaatttactggatgatactttatttaaagacgaaattatgactttcctttctgataatagttctaatattattcaaccagaagaacgggaagaattgatggttttagtattacgtatactttttggtagagctcagactccagtaagtagtggcattaaaaagagtcggaaacatgctgtattaagtattcttcctaatttaggtgaaacttatatcactaaattttttgaactcggtagtacaagatttaaatttgattactttttttctaacggttatcaaataaacgaattagagcttgttaccactaatattagaagaatgataggttatgttactattattaaccaagcattagctattttaggatctaagtatcttaatgccatcctatccacattaaaaccactattatattgtattgcattttcatatgcttttggtaaaataaagagcagtgacacctttataaataaacaagtttctaacttaaggcaacagtctttaagagcattaaattcgatattccaggttataggaaatgcaatttcatggacggagtacattgatcagatctttaatattgttatcaaacctcgaattcctgattttgccaatgaaaacttgcagcagccatcttccttattgaagattattattttttggactacaggaaaggaattttatccatttttatattttaatgatttttcatgtgttagaattattatggacactctttctaatgaatatgcaaaagaatcggttgtctcatgtattttagaaggttctaatcatcttattaagaattcatcaacagatgagaaatatgttgaattggtagcaattattgctagtacctgtcttcaaatattaccgaaattatatgagaaatttactacatctacaactatttctactgcagtggatcttcttttgaatatgacagaattaggttacgtacaagataacgaaaccagaaagtatctattaaattcattatacttaatattaacatctaactttatgaatgtacctaaaagtgatattttgaacattttgaaaattgtagcaaatttaatagttgagtatgattgtcaattatctgagattgagcccatatttatagaggtgtctaaattattacaaaccttttctgaaaagggattgaggttggctattgtatctatcatatctaatattgcagtcagattcgttgaatacaaggaaatagccaccatagtaactgatctaaattcatattctactaaacgtatgcatgaatatgattttccaaaaattctttctgcatttgagcatttttgtgaggaagcatcaaaaacattaatggatgttcaatggcttccaattttacatacatgtttgtattacattaaagatcaagaagaattagcacttcgtactaacgccacttactgtttaacaaaatttattgattttagcaatgcaaagatatcagaagaggaggcgcacacttgtgttaagtatttaaaaatgattattttaccagctataagagatggtttaagaaagacttctgaagatgttcaggcagaatatattacattacttgaatacattgttaaagtatcggtttactattctgatcttcaagatatgcgtgtattgttggcagataatgatgaggaggcaaatttctttatcaatattaaacatattcaattacatcgtagacagagagctattagaagattgggtgattatgtcaatgaattgtcgagtggtagtattgcacactatttgataccaatacttgagtattatgtattttcaaaagaagaaaagtaccgtaatattgcaaatgaaagttttacctctattgggaaacttgctcagggtactagttggaatcaatatagagctttacttcgtagatatatttctattttgaaaaccaaagaagacctattaaaagaatcggttttattggttaatcagttatccttgtctttgaagacaactttgcatgcttttaggaacaataccttaacagaacgtcttcgtgaaaaatgtttcactaatgttgaagaacctgaatcctttattaaaaatgaagtttatcctgtattgtgcaaaattctgggagaaagaaatgatgaaactattgtagttagaattcctttaaccgaggctttagtcaactttatccttgctctttctcaagatgatacagtaaatatgcttcctggtattttaacagcagtttgtcaaattctaagaagcaaatccgaggagcttcgtgatgcaattagaaacactctaggaaagatcagtgttatccttggttccttttatttaccttttatttttaaagagttgaaaagtgcacttcaaagaggatcacaagtacatgttttaggttttactgtacatcatattttaaaagagatttctcaatcaatggtacatgctgatcttgatgattctgctcatttattggtaatgataattatggaagacatatttggtaccgttggtcaggaaaaggaatctgataattatcacactaaaatgaaagaagtcaaagtgaccaaaagttatgatgcagcagaaatactagcatgtaatatttctttgggtatttttgcagaattgttgtacccaattaaggctttattgatggagaaaatgaataataaaacccaacacaagttagacgaattgttacgtagatattctctaggtctcaacaaaaatgaatctgcagattctaaggaatcattgaccttatgttatgagattttccaacaatccatagctgaggaagacaaaaaagtaaaaaaatatacagcaagatcagtggatgaaaaggaagaatttttcttagttaatctaaatttcaaaaatactactgttcaaatggaaaactctatttatacagccactttgcaaaagtttgcccttgatctattaaagattgtcatttctaaacattataacttgctgcattcctcttatttagaagggttcatgccattattgaaagaggcattggattctgaaaatgaaaatgtgttaactagtgctcttagagtattagtcataatagtcaagttggatttttctgaagactcggaaggtttatttaagaattgtgctagaaaggttttaaatttaatcaaagactcaccatctacatctactgaattatgtcaaatggggcttaaatatttgtcatcatttattcgtcataaggatatgaaactaaaagacacagccataagttacatcttaactagagttttacctgatttaaatgaaccaagcaaacagggtctagcctttaattttttgaaggcattagttcataaacatattatgttaccagaaatttacgatgtaatcgatgttgtaagagaaatcatggttactaatcattctaaagatataagagatgtttcaagaagtgtatattatcaatttttgatggaatatgatcaaggtaaaggccgtctagaaaaacaatttaaatacatggttgataatttacaatatccatctcaagaaggtagacaatctgtgatggaattattgaatttaattatcacaaagtccaatccaaatctactttcaaaattatcttcttcattctttttatcattgagtaacgtctctattaatgatgaaagtccaagatgtcgtgaaatggcaagtatcttactttctaatatgcttcaaaaggtttctgataaagacttggagttgattaataagtacttaactgcctggttgagacaagtagatcgtattcaatttactagtttgggattaagaatatttaaaatttatattagtgcattatcgattgacaagaatttacatttgaaggatcttgccttaaaaagaattcaacaaattgttactgatgttgatgctggttctgacttcggatgggatttgatttacactgccttaaatatatttattactattgtggaaaatactgatgaaatataccaagatcaatatagaaaggtatgggatggtgtgaatgcatgtttgctttatcctcatatgtgggtacgtcaatcttcagcacgtttagtcaatttgatggttaataatcttgataaacttgaaacaccaatgagtgattctgagttacaaaatattgctaatagagttatgcatcaactagcagcaccatctattcctgaaagtttgtcgagtattataattaagacattagtttttattgctaataagtggaacaaggaaaatacacagtttattgtcaaggatcaagataaggagagtccatataaaagtgcattagattatatggttagtagaattagtgtaatcattagaaatgaacaaaatatggctgattcgcatgtatctaaaaaggcaagtattcaattctttgccttcttagctcaattactaccagaagaatcaatacatccattggcagaaaagattatattgtcattatatgtccatttagaaactgacaagggcaatatttcagaagagaaggaggaattaagcaatctatctcaagagtgtctacaagtaattgaatcaaaactctcagtttctgattttacaaagatttatgcaaatgttaaacaaattgttattaagagacgtcaagaaagaaaacataaacgttctatcttagcattgaatgcaccagacattgcagctcaaaagaagatcaaaaagcatgttagatcaagagagaaacgtaaacatgagaaggatgatagtggctattatcaaagaaaaaacaaaaagaagagagtatgattgcagaaaccgtcctattccattcagaagaaaaatgaaaacaagcttgatttcattgttagtagttatatatacaaaaaggaaaattaataaactatttagcgttgatgatagattgtatagtatagtatatatagagagactagtgatttttcattatttgaaactttaccctacataagagactatcttttgtagtgtattctattcttattaatatttttgaaggagcaaagaacatgagtatagataaaaatttaatcatattgagagactaaaactgatggtttcagataatatagatgcatgccactcaggtggtgtgataataaatctacaaatatatagttattatagtattttacagatgttgacaatatattagagtatcttcagtcgtagtagatcgcattatactcgagtaggactttaaaaatacacagtgtaatcatctttagtctgatacattaaaaaagtaacagagagattttcaaattttttgtctttttttccttaagtcattgggtttgatatatcagatgtttgtttcttaatatttttgaaatcactttgtattgcagtgacagattctgttatttctttcattggactattactatcgctattacttgtttcattgtctgtggtattcataattttactatcagcaatatctgcaacatcctctgttgtattagcctcttctcttttttcctcaataccttcttcttttttgtctgttctctcagattgtccttctgtttcttctttctcatctgttttcttaatttgttctcttgttctttcctcctcaagaccttcctctttcttgtttgttctttctttttgtccttctgtcctctcatcttcctcttcgtcttcttcccttccatcatcatcttcttcttctccttcttcttctccctctggtttatttgtaagaccagaattctctaatttacggtagtattcttccatttcttgatggtatcgttttttctcctcattatacaattgataatatggtgccctttcttcttcacttaaacttttccaaccttctgttaaatctttagttacatcaaaggaacctttttgtctaattatatctttattcatttcacaatataataaatatgcatttgtaggtctctttggcatattaggatctctctctcttgttctttgttttttactcttaggcttctttaatggattactaaacaattcctttttaaaagtctctaatgttggtaaagggttttggtaatttaactcaggatcgatcttgatacgagattctaatcgttctaatagtacaccatattctaatttaagacgcctaactatatgtcttgatctttgtacagataaccctaatgctgtgttcttctgttgtaattcttcaactttttttttcatctcttgagcatccatttgataaatattgtcattgctgaagtcattttcgtcattattgatgctatcatcagcataattattgttgttattagtatcttcaggagtaatattgttagtggtagcagtaccttcactcatctttgttttcttttagttgtctatatttgttattaacaatcgtgatagtctacagataggtgaagaaataataaaaaacgtttaatcttattatcacccttcgcctaaacaaatctaatttgaccactaaattggcacaaagaataatggtactgatactttgtttttatatcgatgacttctttcaatattgtctcttgattatatagtttgttttaatttaagacttaaagaaaaatttttcactttgttaaatacactaagttattcaaatagaataaagaaggaacgaattgaaggaagcggtatacgggagaaggcattctatacaagtctaaagtgaagagaagccagagttgaaatttaatgtccctaaagaatctgttgattatacacatatatacagtcatatccatatatagaggagggaatgagcaagaatcctttgaccatgtcaagtaagaagaatgatttagaagagagcgttcctttgatactatctcaaacaagagattcacaacagaatagatataaacctgtgccaaatcagcaaagacaaagatatgattctaattttccatcttattcgagtgataatgatgttgatgttcaacgaacaaagattggaccccaaaggacctcaagaaaggcgcaaaaattgaagttattgcctgaagaaagtttcactagtcgaagcaagacatctaaagataataataatgatagaaatgatgaggatgaggacgacgatgaggtgcttgtggagacaagtgatgattttgaagattcagaggaggaagactctgatatagattttgacaataaacaaaagagccgtgctagtagtattggtattgaaattaacaatagtaataatgataatgacaatgatgatgatgatgggtatgcaaaaaataagtctgtagttttaaatatcaatgtcaatgagtctttgagtaatgataacaataatactacagtagattcttcgccaacaaatgtgacaccacataagacagaaataagcaaaaaaactactactagtaacaccgcagaaactgccaagtcatctttaccatactcatcctccgcatttatggaaaaagaatcgcaatcatctacaatattgacaccaactatcaagagagggactactgataatcctaatagtaataagacgaaaatgaaagtaagaaaggagaataaaggatacgtttattcacaagtaaacaaaatcacggacaaacctgcaagacgtgatgctaaacgtcttggtaaagctcaaagacatcttttacctagatgtactgcctattgtactgcaagtagttacaatatgaggggtttgattaaatggttaagagattcacataaagtgtatcatacgaagccgaaattatttgatgaatgtttatatactcctttttcctacacagattggagaagagataaaagatttgaacatgaagatataattagactagataaagaaggtggtgagattaatgtaagtgacaaacgaccagatttatttatatttgaatatggtgttgttgtattatggggatttacagaaagggaggagaaatcattattaaatgatatagaaagatttgagaaggagaaattggcacaagaagatattcaagtggaagaatttaattactatataacaacgagttatcaaccgagaatttataatgatttcattacattaagggatgggtcgaattatatgacaaaattgtcaatatcgcatgcaatagcacaaagtgttaagatatcattatttgaagaattggttgataatactattgaagacacgcaagacataccgcaagagattgcatcaactggaaaagtatcgatgaacaaagaagagataatgaaaagtattggtgaattgtttatattaaggattaatatcaatttgcatggctcagtgatggattctccagagattatgtggtcagaacctcaattggagccaatatatcaagcgactaggggttatttagagattaaccaacgtgttgcattattgaatcaaagattagaggtgatttcagaccttttacaaatgttaaaggaacaattgggacattcacacgaggaatatttagaatttattgtgataattcttgttggtgtagaagtttttgtttcgctagttaatattgcagtggatatctttgcgaaccgtcatgggtaaaataaaatagaaccaaataaggaaaaatagataagtgacatgaaatatattttaggagaaggtaacctatagagttgatacacatgatatgtatatataatatatatgtattgatttatcggtttaagtatctgtttatattccattataagattttatatatatgagagagggaagggaaacgaagaaggatttgttttaatactcgtttttcttctagcaactaagatcgacacaaacataaagttatatgcatagatatgtgtgtgactaaaaatattgtttattatttatttctcattcaatttaagaagtttagcttctacagtattaactttatcctgtgcggtttggtttttatcagttctagtacctaatctaatttcagtatggcatctgacatagccttgttcatgagcatattcatgtaattcaccaataaaactcatgacttcatcccatggaccctcgattgttgtaccgaaactatgcaaagaggttttaaatggactctgacgaattttgttttcgatcatggtgacaaagtcagagacacttggacttccggtacctattggaaccatacaaagatcgacaagcacatttatattaggcatgataaattaaaaataaaactgttgggtgtggatatatgtgtatatatatgtatatgtatctatttagtccagtgtatattgatgtggtagtaacatgtgcgaacactaatgaattctttttttggcgataacgatgctcgaaatagaattgtacagtatccacatatattaatcggagacttattgaacaaggctgaggatatcgatgttaagagagtgcacaaggaattatgagtggatcagtctagttatccaataaaccctcaaggggagatacaaggaccttcattgcatatgcatgcatgcatacatacagaagaagaaggggaaagagatttgaagttgattgaagtcatggttaaagtcggaaactgaaggtttctaacagtttccatttatgtgttgcttttttgttattttctcacaccgtcaactccgatttcttcagggtttttttttgttctttttttctttctcttactaataccctacttttttatccaacttttttgaaaaaatattgcattgaggatattaaccctgttttttttaaaaaaaagcaaaattgtcggattattggaattccttggagggaaggaaagccgcatataatccgtcatggtgaattaaaatcaataaatctaattcatttgaatgaaaaagaaagactttcttttttttttttcgttaagttatgtgaactattgcatatacagaagaagaagaaggaatagtagtagtagtagcaatagtgaccgttccaagattataagcctaggtctaatcagtattattgagcaactagtcagttaatcagccaattattagataagtgtatttgttatctatctataagtgaataaaggaattttcaaattctattatatattttcttcttcttttttttttctgttgggtatttctatttctttgtttgaggaatttgggtaatggtagctaagagtcagtctgtttcagtagatgatgttgttccttcaatagactccaaggatccaatatttagaaataaactaactcaatgtttcgatgacatattgaaacaatcgagtgagatgttggtccaagaacagttgaagactatccaattggatgggtctttaagtaatgggttccttaaaaaccaaagcaaattattggctgatagaatccattcgtttcactcaattttagatgatctggattatacactatataattgtagtaaatttattgataaatgtgaacaagttggtcaaatcaaagaaagggaaagattaaaagctttagaacttgaaagagaaagagaaagagaaagagaaagagtggagcgattaaagaaagaagaagaagaagctaaacttaaagagaaattgagattggaacaagaagaaaaattaaaaagagagaaagaggaacaggaaaaaattaaaagagaaaaccaaataggagaagaagtacttttagtacaggaagggaatttagttaatggaaataacaatgataataatagtaacaataataacaataataatgagggtagtgataagaacagtaataatagcaataatcgtaaaaatggtgacagtggtcttgaactgtcaggtgatgctttacccacatctattaaggatctaggcaataataataacaatgataatgataatactatgggtagtaatgttaccaatacagggttgactaccacgtcaaataataccatagatttaactgcttttggtatgaataaagatttattagacaacaataatagaaacgatgaaaacaatagtaacaataataataatataaatattgatattaaaagttcagtggacatttctgcaaataatacatcttctattactaatatagaccaaaataataatagcaataacaacggtaatccaaatagtgctaataataatggtaataacaatagcatgataaatgataaaaacgatttgaattttagttttaatgaatcttctaacataatgtccatgtttgatgaagatatcacaaataataataataataataataataatagtagtagtattagtattaatggaaacaatggcaataacactgctaataatgaattcaacaagaatactactaatgtcagcaatagcataatttcaaataatagtaatagtaataataatgttaatatacagcaaggtgataataagggaaatcaaagtacaatgtttactgatttggaatctatggatatgtccttatttgaagaattagataatccgtcatttaaatctagcaatttagatttatcaaattcagtaaatggtggtaatgatacaagtaataatagtaacaataataatagtgataatatgtttggttcaaataacattatgggtggcaatcagcctaatattaacaatgttgctaatcagaacgggaatgtgaatgggagtagtaatgataatgagcagctggattctaatttattaagttctatgcaagaaggtagtgaagattatttgacattaaatgattttaatgatttgaatattgattggaatacaaacaatgatacaagggatatgtttaatatataaaatcatagtataataatggaaatgtttattatgtgctgataatgaaactcgattaaaaagcattatggaattatgtgtatatataataatatcacagatacaccgatgatagcaggacaatgcaatattattttaattatatatatatatatatatatcatgatgacaatataatgattatgcttatcaaagtcttactaccattactgttacattatctgtggtgccatgttccagtgcatatttgactaaaagtttagctgcttcattgggatcatcgatatctttgatcagttcacaagcatcttggtcttcgataatatcccatagtccatcacatgctaaaattaagaaatgatcatcttttgttatctctacactagttgtaaatgggttaccaattactaaattatcaaaaaacttgtcacctaatgacctcgttactgctaacatcccattaactctactcttcattatcaacccaccagcatgttctactctttgcatttctaagatatctgatgctttgtgatcataggtaagcctaatactacaatcatttctatatagcactattcgtgaatctcctacgttggctgtatacaatcttcttttatattgttgtaaatttgaaatatcttcactagacaaattatctggcacttcccaacgtaggatacagacggctgcggtacaaccactgttaccatgaagatcagaattaatttgtttatcgatggtaacgaatgaatcattcaacacatctctaacatctcttgtttcattttccataagtttttgttcaattattgtatgtaaatgagatccacaccatttggatgcttgtgcaccggcatggccatcaaatatggcaaaatagccccaatctaatcgtgaagcaaaatttttaacataggtatgaatatcttccatagatctacgaaatttcgaatttttgttttctgctacacctacccgatatgtgacttcaggttgtgatgtagtgacgctattatttgtagttgcataggaattcgtatctgtggttatattatctgaactattagaggaagctggattaggaagacaaagctttgagggagaagaaggagaagacgaatgtagcactgttgttgggatatctttcttatcaggtgtaagttgcatggcaggatttatcctttctattgaaggtatgttaatattcgaagaaacgtcaatttttgaactttcagacaacctaatatatacctgtggttcagtgcgattttccatttgtggttatataatttatttgttgtctggtttgaaataatgtctgtatccacactattagaacttttttttcttctcaattaaaaaaaaaaaagaatatgtttaagaataagcaagggtctataaagctagatttaatgttcaaatgagttaagaattcacttatgaaaaggagactctggtattttgacagttaggtatagtacaataatagttttttttgttgtttttttttttcaagtttgtgatgtacccaaacaacaacaaaaatacaaaaagtgtgtgtagctcactccaatgattggataattaaagctagagatgtcttcaatatcttatgctaatgttctttattgtattaagacatagatagaaatatgcatgtgtgtattctacattagttgctgtctggtagttattgatggcttattcttttagattagtttataaataaaaatacaaccatagtctaaatttagaatttttttttcctttcagaaggagtttttgttgcttttttcagccatattacgataaagtatcacaaaactttcaaaacatataattaaatctaatgtaaattcttatatcatctattattacaagatattatgtgatatccagtgcaggagttgcttttatatgagtgtatttaggtactactaattaatagattactactaggaatttaagtaacatggtaatttatgattaatgaaaggtataacatataacataatcttaatttttaggcatttgagtttacaaagcttagaaaattacttacaagtagaaaagagtgcaataaatattgtgatacattaatatttataatatatatatattataaatatagaccttctaaattttcttctactttattctttaagacacgttccttagcttgtttgaagtcttcagcagtaacttgcattcttctttctcttaaagctagtagacctgcttcagtacacatggcttggatatcagcaccagagagatcatctttacttgtaactaatttttctaaatcaacatcctcacttagattcatctttgatgtatgtatacctaaaatcttcttttttgtggatagatctgggttttcaaataaaatcttacgatcaattctacctggtctaattaatgcaggatccagactctcaattttattcgtagccatgataactttgacatcacccctatcatcgaacccatctaattggttcagcaactctaacatagttctttgaatttctctttcaccaccactatttgaatcatatcttttggtaccaatggcatcgatttcatcaataaaaacgatacttggtgcgttatctgcagccactttgaagatttgtctacaaagtcttggaccatccccaagatatttctgaattaattcagaaccgacaatacgtaaaaatgtagctgatgtttgattagcaacagctttagctaataatgttttacctgttcctggggcaccataaagtataacaccctttggtggtttaatacccatttcttcgtataattctgggtgagtcaatggtaattcaactgactctttaatttcctggatttgtgattcaagaccaccaatatcactataggattcagtaggagatttatcaattttcataacggagaccattggatcagcatcatcttgtaaaacacctaccaccgacatagttttattatgtaataacacagaacagcctggttctaacagttctttatcaacaaatgataatatagacacataataatcaggcattgtgggacttgtcacaatggcatgatcatcgtcaatgatttcctctaaagtaccaatacttaatgggtttcctctgatctcttccaattgttttttttcctcttcctgtttcttttcaaaaggtttcaagatctctgaattagtcacaaattcttcttccaataataaatgatctttaattctttccattcttaataattttagtttacaacgtgtacttggatatatatttggcaatttctctgcagtagctggaccatgctttctttttttacgaccaaatttagattgtacgggtggttcatacttaggcttttctgaggatttcttcttcttattttgaccagctgacgcaccttgtcccatttttgtttgtaatttatttgtctgtgaatatgtattggctcaattaatcaaagtcgttttattttttttgtcacacaaaaattgttcagaaatatctttttgattttattattaggtggtttcaataacctacaacacaacaacaaaaataaaacagaaataaataaactttcttacgttataggtcagatatcttataataatagtactaactaaaaaataactagacgctatttttctcggctgatctaaagacttttcttttagcgtgttgtaggatataattttttgattgaaataaatcagctagtttccagtatacatttgccacccatttgtatgtttttaacatggtctttgcaaatccattaatcacatttcaatgattttcaactcgttgtttttcccctctttctcttcattcttttcatacttttttttcacttaattggttctacacccatacattacactacaagtttcttcggtttttgtttaaaaaaatgtttaaaaagccgacaactgcaggattcgaacctgcgcgggcaaagcccaaaagatttctaatcttacgccttaaccactcggccaagttgcccaaccactgtcctttttgttgtggaatagaatagttataaccatcaagattacataagatcctgaatgaatttagaactatttattgtcttaataagccataaacgtgctacaacattagatgctgcataataaagagattggattacataagatttaacaaatctagaatttacctattgttttaataagtcccacgtgtattactaatcaccatgattagaaaattggggtgcagttctaatccactagtgcacctaaattaatgtaataaaatttagggtgaattagtcaagtcattaatgtactaatctgaataatcgatcgagctccagaaaacatataaaaggacaacgttttctggagataaaagatcatcttccataaccgtttcttgtaaataacttatatattatgtataaaaaaagagatcaacaagtaagtaacaaacaagtaacaagtcaagtaacttcgaataaatatattagctcgacataagccgctcaatatataagaccgttttagtaattatattatctactatagttgattactgtctcgattatttgaataactattaatattatttgcgcttccctggaatacacaaagaatctcaccatctcatattacaacagttttctgttatagtttggacttagaaccaattcttataataggactattgaacgaatagtcaaggcaacaacaaatataaaaggatgttatatatataagagaattaaaggattactgcttattcttttttgtattatataatatgttacatataattataaatcaaccaaacatacaaatttagatatcaagatgatggtcctttatatatgaatcatgggttgatagtttcttatttggagttctgtaacgattgtcatcataaacacatctctcatgaatgtttcattaatgtttcattttgttacttagtattcaacaatcacatgggatttatcaacaaaccctaagtcctataaatccaaactagaactttttcttgacaaccatcacaaaagccctaacaatatttttcaaccctaatcttttttttcatttaatcataatatcaaggttggtctataatactttctattgtataatagaggaatcatcaccaataagattacataagattttgacgaatctagaatttacttattgttttaataagtcatacacatgctacaacatttttactttataataaacagggattagtttatacttacatacttctttgtaaagaaaaaattttttgaacaagatcagacataatctttatgtcctagaaagcttccaatcagatttaatatcttatattaaccgttgaacatatggctgtatcaattgttagcctaaaaatttagctgttacccggatgattgaatattaacaaaaatccagttaagcttctataatatacaaggccaatttaaatacaagaagattttttttctttgtaattttgttttgtagatgaatatttatttcttgatcttttgttgcattttacaaaaattttctaataagttttctttttttgacacaaattgtaaatatttatacagtgacaggaacatatgaaagaataaacaaagcgaaattacttaataatctttttctattaaaaacttactattaaaaatatcaaacaactaaaatcgaatattctagaataaatagatagactaattatattttagcaaatataaattgatgacaaaatatgaagaatgtattgtttacttatcaaaaaatgtaagcaaaacatattaacaaatcaatggcgtacatagaagagatatgtcagaaatgaaaatatataaaatcaacattttttcatatcatgttttttcccctgtataatttttatatattatcatctccacattatatatatagagaaagagcaaagaacttttatataattttgtacactatagctattcaattaaaacattgacaatgtttgttatatatccaatcatttcaggtgttcattctcaatataaacgaatataatatatatatttccaaatgaccattgaaatgaattaataggcattattacacagagaaatattcttatcaagaacaaaaaaacacttttataatttttctccataaatcttatataactatttttttatctttcactcatatttgtttttatattttatttacaagaaatcaataaaatctaattacaaaaagtatattaatgatcattaccaattaactatgtcagccaattcaagcaatatattaatgccattttcttataaaaattatatatcaataaaatataataatataaaaataagctgtcttagacactctgcaaactaatcttatttaaatgcacaaaatgtatcaattgaaaaaaaaaaaaatactttttagacattaatccctgaaacccaatccttgaagataaaaaaaataaaaaagacccctccattatttatataaaagactaggaatatataactataataaccaatccatgatatccgtaccttttatagttctcattttttcttttctttttcttcttttaaatgacaaccattaaaacttatcgctatgtaatcatacattttatatttcttatcattaataaaatattaaaataatatcaacattacccaagaaaatgcagtgaggtttttattttcatcacctatttgacccaacatggctcttagtaaacatattaaaagcaaactgagatacttttttaaaagatggagaggaaaagagatcaaatatattcaattccaagtattgttaaaagctcttggataatgaatgaagcaaaaaatatctattcttgaaaataaaagaaacaaagtgtattttttaaattataagaatattcaactaaacaaagcaaaaagaaaaaaaaaatatgttactttttattccacatgctcactctcataggacatatcgctatatatttcatcttcgttatcaaacctatatctatattcacctgaatcactaatctctatcgaattatacccattttttttataaactttatttttctttctatcagcctcttccttgtataattgtaatatctttgcacctaattcaagatcttcattatcaatttcaccacactcatcttttttgtctaataaacttttcttgacaatttcaaataaatctttctcttcattatcatgctttgcaaaatcattaccactattaatcttatcttggcctttatcatttccatcttcatcatcaatatcaatgtcactatcactactattatcataactagttgtactatcatctctattagcccaaggtaatggtcgaataataggataaaaatttacatactccttaactgaacctccatcttgcaaaatagcatcaaggttattatctgggacataatcaggtatttcatactgattaccgacccagtgtccgatatcttcatcgtcttctactcgttgggccactaactgaaccatcatcgcattgaattgtttacgaacagggttattaattgggtaatttttctttaaaaggaattgccttctacacatgggacaaagaccctttgaatgtaaagttcttagccatcgaacaatacagtggtaatgaaagaaatgtttacaatcacctataactaaaggacacgagtcaccaggtattttacatgtcggacaggttccattataattagctctacagatcccacatacatcattctcatcttcatcatcactttcttcatcatcataaatatcatcgacattactcacatttgattgctgactattactattgctatcgttgaggaaatcttgtgatttatttatagttgttaatggatgttcaggctgtttttgtttgttatagttaataatatttgggtaaaccttcttttcaatatcgtttttgatttccaattcatttcttgtatcccaagaccaagcaaatacaggtgtaaccgcatcaaccttcactttcattctagcaataaaacaattacctctaatattataaaccaatacgtacagctatgtgtttgtatcctccttcttctttgtctcaatagttgaattaaatgtcttctatagcaaagaaatttttcaaatccaaaaatattactatagttcctatgtatttattattaatatactatatacacaatacacaaatatactaagagaggaaaaggaagaaacttaaaaattaatgagtacacatgacaatgtaaatactcaccgatatatattggtatatagaagcacaagatattcatatatgtttatatatgatttctgcccccaaccgatatttatttttgcgatagtggtaccaatctctttctaactgtaagcttattatcacaccatttaactaaactatcatataaagtctctgaattgaataatttattaatgtcatcaaatccacctctagactccccattaatcattaggtttggtactgttgttctccctgtaactcttcctatatactcttgtaattcagcgcctttttggtgtcgatctaattcaatgaatataattggtggatcaaactcaaaatgatcagataacagatttttcaatttatgactatatgggcaatatgttttactaaacataattatcgggccaaggtttagaatttctgcatattccttctcaatatcgatagcagaaacatttagaggttcaatctcctgttgttgttgttgttgttgttctatcatttggtcttgttttatagccgcttctttgttgttggaactttcctgtactgatatatcattaatatcattatttataggaacattaatttgcttggcatcgttactattgtaatcattaatctcatgaataatggaatctgaatcatcagttactgaattgaatgtagggataacgcttgtagtagtagatttcaatactgttaatgtcaaccccaacaacaagatagtgattatcaaaatcctgatatttcttttctttaataccacgaccaccattattaaaattagcttgacaggatatttagatatcacccaataaagagttttttcactggaatctgcttgtcttcttataattcggtaacactaaaagttcagcgacgattgatgctttaacggctggctttgctgttgttatatcgatggaattttatatagttaaattagaggttgaaatatcgttcttcacgaaacaccaatatacatcattacctatttaaagctcagtttactcactgtgaagagccacaaacatctaagcagtagaatggttttacaataagcagagaccactacatcgtctatatatatatatattgaagcagtagtcataagaaaagtaataggtacaaactttttttatatgtttacgtgcatcttatagattgctgcattaacaataatgatagtggaaattaatagtgttgataaagttgagcaaagtgactactctaatcagggtaatgaccaacaaagtcgattaaattcctctgttgatcttatagaggataacaacgaagaattaaatgcaattcgagataaagagtttcatgatgaaccagaaattgtgatattaggtaataatgaataccacattaataataatagtgttaatagggaaagtgatattaataatatgattgacaataatgacgaagacgaagatatttctatcatagctaccagggaacaacctgtacaagaacctattgtcgttgatctagataatgaaccggaaataatagatatctcaaaccatgacaacagtagtaatgaccttgatgatgatctaacaattattgaagaaagaaatgtgcctaatatttatgttaatgaagattcgaacttacaaactacacaattacatttacctggtggtaattcgattcaaataaacattagtgattatgaaagacctaacagaacctcgtttctaaatggagagactcgtagagatgggttttctaacagcaattctagaaggaatatattttctactagtgacagaatacgattaataagagatttggaaaatatctatagtcggagtggcccgaattctataccacctgacattagatcgtatatcatggaacgactatctaatggcaacaatggaaataatagagaacatagtaggagaaggcaacgaaacaattcttcaagaaatactagtagaggtagccattcccgtagattacgccgtcgcttaaatgacagatatggatacgaaaacccttgggtttatgacaacaattatgagtacgaatatgaaaattatgaggatgaagacgattatgatttcaattttggatttgggtttggttttgatgggaccacaaatcaaaggaattattatgaggaagatgatgaaagaagaactcaaagtattataaatttcattgaacaacgtgaaaatagggagagggatattaaaatacaaaaactgaaggagaagtctgaaccaataaaacaaaaatttatagactcagcaaacgatatggaaaaatcaagtgagtttacatcgaattttactactttcattcctactaaagaaacaaaagataataataataataatagcaacagtaacaaatatgatttgatagtaccatcatgtgttctctgcggtgtagagttgggtgtaggtatccctgacgactatgatggtattgctgaaaaggacaaatcattaacttttgaagatcttgttaccaaatatggctaccactgtccataccagagtctttacaggcccacacaacttgataaagatctatcaaaaagaacttttatatctaaaaattgtggtcacttgttttgtggccgttgttttgcaaggattgataatgccaagggaaaaagtaaactatctaaaaaaaaattatctgagttgaaaggtccctcaaacccaaataattatggaccaagagtgtgtcctgctaaaaattgtactacaataattagagcaagaagtcgattaaaagaagtgtatttttaaaatagaatttttatgctcttttctcttttttccttctttccatgtcatagtatttatactataaaattgcatattaataagtacactaaacacatacatacatagatatatattccaatcatttacttagagtttttattaacaaatattctaaaataagccaactatagaccatcaaccggtgaaatccacattgtatttacatgtatagccaatgatttatatacatacatatatatgaaaaaatagaagataaattattacaattaatccttatatacacatacatatcttgtattgtacactatgactaggaaacttagaaagaaaaaagaaacagactagggaccaaccgaaaccaattaaaagcatacagcaaaaaaagtaaaaacaaagaaagaacagatggggtatctatgcaaacgaaggtgaatttctctagccagttaaccattaacaattaatatattcttgcccttccgcttttctagaatatcgatatgatcttgctactaatatcatattttgatacaaaagagagaataatatcaatccgattaattaaagtagcatatccaaagtacaacacaaacacatagcagctaaacaaccagttaaacaatcttcattaccacgttgtggggcttgttgttgaacatagattggttgctgtggtggaggttgttggtagtattgaggttgtggctgttggtaatattgtggttgttgttgtaacggaggttgataatattgttgttgcgcaggataccctctagtattattgtagttcatatcatgagatggaggaggaacatttggacgttgatactgtatgcaaagattaacataattaatattaaaaggaagaaaaatacaaatatatgccacaatatatatatatatatatatgtgtgtgtgtgttttttgtttattgttagtaaactagctcaaaagaaatattaaacaacgttccatctataaccccggctaaaaacaaatacatttactctatttattgaattattctatctgaaatctgattagacaggggaaaaaatgaatcaatgagttatctaataattgaacatacctgttgtttattgtcaccataatattcgttagcagacatattccgatattgtatttttaactaattttaacttaatgatcttttcttgatttcttcatgcaataaaaagacaaagcagattacaatagtaaacgatgttcagccatcatgattcttttctcctttttgatcttatatatttgtttatttgatcttcaaagggaaggaaaaaatttcagcctcgatattatctgctctttttttttttaacacgcagaaaacaatacttttggaaatataatgttttacgaaagtaaaaatctattgtttttccttaaaaggtgtagacattcagtttttattgtttgtaaacactacttttctattgtctttaaacaaacaaatatgttgtatttataatataaataaatatatttgaagttcagatcaagatatacaatattttgaaaagtctgtatcctagcttaacaaattatttctttaaataaaagcaaaaaaagacgcatgttctttttataaataacaacttctaaaatatattgttttacttctcaaatataaaaaaaaattttaaataaaaacaaaaaaaaatttgatcaagagatcgtaataatgagctccaaaagtgattcttctatattcttaaacatgtataattatgcaaacacctgtaaagaattatctcgagtaatatactaaaatatagatattaatcgtatataaatatttacaagttataaggtaattggttctaactaaacaaattaattttaaaatttttatttttctttcgtcgttaataactacctctggtacatactttctaaataatcagaggttttttaataaaaatattctctgtatttgactatcaatgttaatttgaaaatttctttgtacaaatacactcacaatttcgactcagattctcagatattccaagccttttcgtctcaatattaagaacactacccaggaaaatacctattttcaggatttccaaccagagcttgttacactgtgtactatctaagagaatgtagcaagaatatttctaagttatttgaagatttttgcaatgccatataaattgttaaaaaaaaaacagatactttaaataattcaaagatatgaaaaaatgtgaaatatttaatttaatacatacaatattaaaatttttaataagtataattgttagttcagctaattctgaagaaatcaacctttttatatcatcacagcttgcaaagaggatattgtcttttaccaattccaacaaccatctacaaaatggaaaaatgcagttcttcctcaaaaaaagtccacagctaacagaaaataaaaactagaccagttattcaaaacaattttgatatttatagtgaaatgtaactattaaccttgcatatcaaagttaactataaagtataaaaaagatcttatttttgtcagatttttacaagttatcttacagttttataaatatatactcccttctatacaaaacctaaatcctctaaagaaatattctcgaaaaaatataaaatacgaataaactgtgcatattttccccaaaatttacagattagatagccaaataaaccttgttacatttgataaaatttgcatactacaagaaaatcttgcaaagcacaaaaaaaggttaacttttttttttacctttttctggctacttaatcatcaatctggatcattgcgacacgaaaaagagaataaccaaattattttgagatactattcttctatattacagttcctttgccaagtaaattatgagcattctatagatgtgtgtccaaataggcttatttttaaatatatgagtcaattcctattaataataaagtacactttcccccatccagatacttattgctagataatcccttaatatggaaagaatatgaaatatcaaattcttgaagactttaatatttttatcttttaacctttatttttttttgagcttacagattaaactattgatatatatccaattcatcttgatcaattcatgcattataaacttcagtatcattcctcatttctttttttttacaagcataaatgcaaataaatgctaagaatatcatatattctgtcaatctaaacataaattaaatattttattcatatatttatcaatcttttccattcaccctacgtaatcctaagatatttacaccaaacatgttcaaaacaatttcattttacaaatagtggcaacaggaaaaaaataaccttcccaaacatatatttacacttcttcttcccttttcaaaaaagactctaatttacctcacatatgtcattttaaaaatacctttctaaataacttttactggctttaaaactaaatcctttaaatacatcactaatatcagtacttgtaacagccacattactaccatttacacgattatcagaaccctttggaatatttatggcataatcatcttcatatgacattgaagtaaattcagaatcgaaattttctgccagttcccaatctgtaatcattggtacaataggtcccattgtagttttttgtaagtcccctgattccatcatatgccaatctatttttctaaaaataaaatgtgattggaatttcagttctctctgtttgcctggtttcttattttttcctttactatttttattgatattgtttggattttttgtttcttctttccaatatctatcgacatcccatcttttagttctgtcctttttcaataaccaatttaacatatctttcattccttcacttaagtagaatggtatctttggaccttgtttgtccttttgaatcttatttagaataactttatgattgttcccagtgtaaggtggtttcccaattaacatatcgtataaaagacatccaagtgaataccaatcacaatttttgttgtatggtagcccttgtagaatttctggagcacaatattccggtgtaccaataatagaatgtaatgtgtaaatactttcctcatttttatcatcaggatcgctattagattcctctccatctatagcccttttagacaaaccaaagtctgttaaaattaaatgtcctcgttcgtttaataaacaattttctggttttaaatctctatacactatacctttgtcatgaagaaattttaaagcacaactgatctcagcagcatagaaggatacagtatcctcactcaacgtaccatattcctttaaatgataaaacaattctccaccagggacatattgtaatactaaatataatttattttgatcatgaaatgagtaaaacaatttcacaatatttggatgttctaattgtgataggatttttctttccgcaaatgtcctttccacattcaaatttattacatcagtatcattaatcaatatctctgccttctttaaagttttcatagcatataacttggatgatttctgatctttaacaagaataactttcccatatgcacctttacccaagactctaactggtttgaagtcatgtagattccttgaatgttcatcagttgtatcatcggaaatttcatcgaccactgtttccatggttccatcttctcttgcaaaatcatgctttttaacaaccatatcttcatttttaagtggaccaactgaaactcttcttgtatgtaaaggcgataatacagaaaatttatctagcaccgataaccttcttctatttttaatcatggtgggactattttttacatccatataatccgaagataagaactggatgcactgttgctgctgttgatgttgttgagggatattagaattgtcattttcgacaagcgatatatcgtctaatggatctagatcatgtactgcaaattcagggacactatttgtcttatttaactcttcatccaatgaaaagatcatttctaaaccatatgaacagatgaatctttactcttcccagttgctagttatccatctataagttatctcttgctcccttaactactgcatttacagttttcttaaatgttaatttcattattacttatttctataccactatattaatttttttttctaccctccattatttttctttctagctccccccatagcacctgaaaactgctatctctttgtttctacgccagtgaatgtaaatatgggtacataaaatagatatagacaaaagataatcaaaccagacagatgtacaagatatgcaaactaacttgcaaaaaagttatcgtaacaaatgtaagaaacctatatatgtatatacatacacatattacatatttgtgtatgtgaacaaatacacgactcctaaactattatcattatttctctttctgtcaatttaatttaatttaataattttgagatggtatcaatagcaacgttcaaagtattttcatcaaaaacctccctatcccttagagtggttagcaattgtaaagttaaagtcaaaatatcattattatttaaatttagtaaaattgtagagacgatagtttcaatagaaaatctcttctcagagatgaaagtttcaaaatatagatttgtaaaagaccccattaagaattgacaatccactctatctgcaataccaccgtgacctggaatagaatgaccaaaatctttcactttaaaagttctcttcaaaccagacgcgaaaaacccaccgaatggagcaaaaagagatgcaaatgtggccaaatttagagagtgaatatagattggtttaattgtgatagaagtgatatgcaatctttcaaaaataacatgatttaaattgtaagtttgggatctaaagattggattcaattcacaattatttggtgggttccagtaatttgaataaagtaggttattattaactggacatgttaaataggagtatggcgataaaattctggttaagataatactagcaatagctgtgaaaaaccatgcacccagaaaaccttctaaagttttctttggagagatttcaatcaatttagtttttccaaaagtgataccacatagatatgcaaagatatcattaactataactagaccacatggtagaaggaaccaaaataaaccggtcataatattattaataattaaatgtgcttgaaagacgataaataataaagccatgtgagtagcacataatgatgccatttggaatttcaaataacctttccttaaagaactgacaaacatgataaacccacaaacatataagcaataacagataaatttatgatgcgaggaaattgcaataattagatcagtataaggctttaataaggaaaaatttgattctaaaatgattttataaacatccaacccatttagatagtaaattgtggtaaagactaaataccaattcaaaaatttattgacaggtaagtttttagctctcgaggatgctgtagtaacagctatacattctttaaaagtcattaattcacaaaataacactagtagaatacaccatgaatgacctgcagctaaagtcaaaaaaaaaccagcaatcataacaaacgtccaaatggttcttacaaaaaatgtctgtctcttcttttcattttgacccaatgtagattgatctgtaccaactgttggcttgtctacagtttctgcaaccgttttaccttttggtttactctttgaacgtttgttagtagacattattcaaataaataaatagattgacagaatgaataatttaatcaaattgcaatgaatagctaagtttcctttaatttgcaattgagagaggataaggagggaccgtaatggctctaatagcttaacctatagaaattacacaggatgcccctatctagcaatatagagtgattgttttcagtcgtttttttttcttctccacattacatacgaacctatgtatataaacattgcaatcttcccctagtaaagacatctttcaattaaaaaaaaattacgaaaacaaaaagaaaaaagtaactcattgaacaaattttttatttattcaaagaaagaaaaattttcttttccttctttttttttttgtcactttacggaaatttgaataaaaaaaaatgaaaaaatattctcatggtatacaaaagagggtaagtgcagaacaataggaaatgcaaaaggacaatagaattctctttggaaaacggcgatcatttaccattttaggaaatatgtaaagaatagttttcctatttctctttgtttctcttcttttctcgagaaatctttcacttccgttgcatcgcataaaaaacaaaacaaaacaaactgtatttcttaaatacgtgcacgatactaactaaaacacacacacacacacacacacatatatatatatatatatatgtatgttagtaataaatggctatcaatgagagattgaaatcgattatcaataaaaaacgaaaaaaaaaataaatgaatcacattatctcttggaacaaagacaattatatcactgaagactatatttcaaccagtaagaatgaacaatggatattcaagtctaagggaaacataaaaagtggtaccattttatttcaattaaataaaacatgtctttttagtggtaaaaactgtacagtctcaaccttgcttgattcaagtgaggatgaaatgtttaaaattgttgttggttttatttatgaaatattcatctttggcccaaaaaatagtcaatggtacgattatttatctccattaattatatactataaccaatacaagaatactgacaatcgttctactagaaagagacatactgaatgggaaaagaaattttattcttactacactctgtggaaacaacaatttggatgggaatttattgacaatgatagtaatatgatagattttaaagttatttctaatttcattgaatcagctattgttatgatagattgttggataggtccatgcttgctacctggtggaatcatcccttcaaagactggtcttaatacgtgtaattcaactttaataactttacaagatgtgtgtactctatgtggtgaagaagactgtttttgcgaagaagaaagtggaagtgaaaatgaagatagaagtgaggatgaagttgaggatgatatcaatgaagtgaatgaaaatgtagaagaagaagaagaagaagaagattctgatattataaagaaagattgtattacaattgtcgctggaagtgatactactgatggtaatataatttcattaaatcccgattctactttgacaattcatgttttggacacttctgaacttcaatattctaatctttttgaccttaacaatactgagcaacaaccagtttggctagatgaagatggaaccccatcagattggctcttatatcaattagatccatattctgaattaactgattatcaattaaatataaagctaaaaaatatcattctccataaacttatagagttaaaaaatcaagacatttctaaaaatgaaaaatcttatattattttaaggaaagccttaaaaaattattatagataaacagtctatgtacatacatacatacatacaagcattttttacactcgatatctttttcctcttcttcttcttttttttttttgccaagcttacatatatatatatatatactagcttcatttcaaataaggttttttttttcatatcttttgaacatatccctgttgaattaatctttctacatcactttgtctaacatagaattgtgaatctttgacaaaattaaatgttccatactctgtttgaatctcaccaatatcttttagcactctgatatcaataaatatatcgctaggtgggttcatattccccattatctctattgaagaccataactcactttcactattcatttcatctataaggtttttatattgactcatgtattcttgttcataatgtgataattcattataaccagaccttttagaaccgttattatacatattattgcttcctataagaccattccaaaccattttatcaatgatgtcactcctcatcctttgatatgccatcagacatcttttatttctctccagacataacagattcacaaaatactgacattttcttattttgtcatttgaatgaccagacaggacatccttgagttgatcctttgtctcctcttcttcctgtttaatgtgttgtaaatattccgtattctgtttcaattgattcacttcttttaaaatattatatattaactcgtcgttatacattggtattattgtctcatttccattgaaatcattccttatcccaccattatcagaatttaatgcagcatcaaggtatttttgagtcaattgttctgttctcttagcttctataatcaacttattagctaaatcaccatacattataccatagtattttgtctctctctttcaatactactcttacctaattaattatttgttttcattaagcacctttattccttcaatttctccacacgatactatcaactttgggttactactctcacagtcaaggaaaccacctttagaagtcctttcctttttttactaatgtaaattgattgtcaacactcattgatgttgatgaagataaaaataatagtaagaatttttcagacgcgtaaacttctcctttctgattaatgatttagattgaaaaaataaaaaaggctaaacgcgtcattatttctttatgtctttcatttatttgaaatatacctaaaggtaacatcaatgcctattatcattgctaccaatattaccataaaaattaaaatatgcaattcgcagattatcacttgtagtaccaatttcatcagagatactaaaaacaacggtgattttttataacatattctgtccctaaatgtcagatattattccaaattttatattcaaaaagaatccaaagaaaattagaaagacgtacataaaaaaacagcacaacttagataatggcgaaaatgatattaataatgaagacaaagattcaaaaaatgaattatataatcaaaattcttttatagaaacaaaagtatatcaatttatggctcaattacacagtaaaaatgtaatcaataataatctattaatggaagaaatccaccatgctttagtgactagtaaatctcccaatttaccatttaatatctcgaaacattattataacaataaaagaactatgttagtcaattgtacggaaaatgactggaatgaagatgatgtaaaaataagtatgccttcaaataaaaagaactatatggtacctgataatgactcagttgatgatgacaccacattagttatgtcagaagtttcacttaataataaaaacaataaaaatagaaaaaagagattctttggtaagaatcaccaaataacaagaatgaaaagtaatttgaaatatcaacatgattatgattttctgataaataacgacctaccgctatattcgaaattattaaatttgataaacataatatgtgatgaagatgatatgagcaatgacgaaaatattaataatgacagttttaaacaatattttcttaaatggaagttacaagaattttttagttattgttctaatcataaagatataaaaatttcgaaaactcgattttttatgatgtttttattaatcaaattgaatttatctatggacgagagtccatcacttataacatttttaattaaactaatacctttatctattaatgacacattttcaatacattgtattgataatgtcagcaaattaacgagaatcacattaaaaagttttcttaaatttcataacttggaaaaggttactaatcatcatctagcaatcaaattatggtcattttattcacatcaattaccacaattaataccgtatatccaaagcttaaatttacacttagataatagagaagatgatattgctattcattcaaaatataagacaaacaattgcatatttatttcaaatatcattattcaatttggtcaattgataatggatgatacagatttaaattatttcttacttaatttgttcataaatcattggatagttatactgtatgataaaatttctatcatggcattcataatattaacaaataataaatatttattcctaaaattaaatgcaactaaaatcaatgaaattgtctcaaagattgtctctatgagatataaatgtttaaatgaaacagataacgatgatattatacaattgcaaatctgccaatttgcactctgtttaaatataattgaattaattaataaagatattcaaatcgatgagtgggatttaataattaataaagtagttgaaaagcacattaacaataaagatagttctaattttaatattgaagaaaagaataatgacagggaatatctgttgggattattcatattaattttattacttatcgaatactattcacaaaatagaaagtataaaatcacacattttgataataaaaacaaattaattattattttaaaaaaatttaaattgcttacgagtgataatattaaaataattgaaaatattgatttaattgttgaaaattttaaataattaactacttcttaccaacgataataagatgagttataatatttaatattaatgtttgactgaatttataagatgtcaacaatattcaagatcaaaaaaaaaaaagaatttcattctatctttattcacatatacccaaagatacttaagcttaactattattccggaaggttcatataataccttttttttttgtcctttcataattcgattattaaatattaaataaatatcactgcatctatcataattctatataggatatatattaatataacttttcccttactctaacatattgattctgtaagacctcttgaccaactaaatgcacccaatgtaatggtcaacaatatgtaagagagggcaatcgtaataatataataattcaatgcatgagccaaatccatattatacccctcgttaatgaaagtactaattgtacttaaagaaccacaaaacccacctgctaaactggaaacaatacgacacgcattaattcttgatacaattggaccagtcaaggaggaattataacctctttgaactaaagtgaaaaaccctaatgttaatacagcaaattcgttgcatataaaagtgccgtaataaaactttttcgataatggattaaaaaacaaagagatataatatcttgcaaaagtaccaaagattccaaatatgggtcctaaagtccaatcactccttgaaaagttgtcatatacagatgcaaggactacaaataggatagttaatggaatgcccaatccagccaataagaaatccacaaatttaatatatttacgtagagttcgataactaatgctctctaccgaaccttctggtgatgaagaagaagaaaaagaggaagaagatttatgtttgacacatatatctataaacttaacaataatatcggatgcaaaagctctaccaaaaagataagcacctaatgaaacaaacatttgacatagaagcacagataaaaactccattataccataagccctatttggtaatttaaaattatgtttaatattgactggatttaaacttgttgaaaataagaagacttctaacatcattgaagagtacgaagacaaagaaccacaaaacccaacagttatcccagtgaagagatatggacactcagtgaaccaaccaatttctttggcattaagtgtttgacacattcccattattaaacatgatacaaaatttggccataaagtattctgtggtgcaataaatgagtagctataattcgataaatgtgaaattccaaatcttgtagtattaccaatgattgtacatgtaattaatatcagataacagtggaatatacttgtaggtgataataaaaaatctagaccagcatatattttgttctggtccttcattttatcaagtttattaaccgagtcgactgttgatgaatcctctttatcctcactcatttactcgacttacaaataatgaacaaaaaaactttaaaaaatattatattttatatactttctttcttttttttttttttttacctccacaaataaaatcaaacaaagactatataaattaacttatctttgtttttctcttgtcaagatttgacaccattaattgtgtacaaaagaaatgaaggaaacgttaaaataaaacataagttagtgcagctgtgtgatattccttctagaaatctgtattcaaaataagttgacgtattcataaaagtattaaatatgatgcatttaataacgataattatcaaagaccaatcagccgactaagataatgaaaacaagaccatgtggttaccaacattcagatttcaactattattggactcaaaaggatctgtctatctatctatatacatgcagatgggcattttcctcctgaaaaaaagaaaagaaaaaaatatctcaacaatcgctatctgaaaaatcatagtcaattttttcttcgtgacaattcgtatttaatgatagaagacaggtattactttctttttttttaatttttttcccgtttcgactacatattccggtattgtatttttatgcaagcttctctattgttattttcaaaggaaaacagtgaataagtatgccaatttcgatctaaaatacaaatatgcttctccttctatgatgagaaaaagaaaaaaaaaacagcattatttgatagtatatttaatatctaggaatttaaagaagtttgaacttcaaaaagaggtatcttatacttttttatttttaatacatttgaatattacgtggaaaagaataaattctactttcaagtaaacaaaagatatcgaatgataaacattttaattttggttcttttaatattccagacaattagtactaactatcgtcatatcaataaacaaaaaaaaaactaaaaaaaaaaaaagcagatagattgaactatagaactctcagaaaaacagaagtttaaaaagatttaaaaataaacggagatttcaagaaatctcacctttttaagatcagatacaatataaagtttacaattataatttttagggagaaaaaaagaaagacagaatatttttcttttccttttttgacatataccctatctttctctacacactaggagcgaaaaaaatgggccaagcaacacaaaaccctatataaattgttttgttatttatcaatgttttcttctctgttcttgttgcacatgtctttacaacttctatctactgtagccaaacaaaaaggaacatattctatattaattatataacatggttaatcatcaaactttcttctctggtcctctctatgctttagatcaggataaagtatcaagtatatatttaatcagatcactattttaagcaattttagtcagcgtaaacatacatttatcgaaagtagatgagcctttcttaatctttgtgatcttaatttcatataaaagaaaggctttaaacaaatatagaaaatgatttaatataaacaataacaaataaaagaatcatacctgtatcttgactgttgttattcattccagtatcttctttttatcatgactatttcataagtttccaacttgttttctttattttttttttttatttatataattctcaaattgaacgcatcttatttgaactagctattttagccgctgacagttagcgttatcaaaacacacacatacactcgcacaagcacacacatatatatacaaagaaagtagtatcaaactttatcaaatatcttcacctccatactattaatacaactatataacaatagattaatacaaaaagaaactgtacaatgatgactggtgatatggtgaagtccaatgtcccaaaagaaaatagaagatgcacaagaagaagtaaaacagtgtcgttccacaataattatgaaaaatccaataaggtgtttgaatcaagcatcttaacagaaacaactaataaaacttttaatagtattgataatattaatactcactatatacaaaacgatttaaacgaaatatatcacataaaacaagtaccaccatcaccacaattacagcaacaacaaagtagctttcaaatatggagaagaggtaataaaaggttccatacaatctcatatttagataccgattcagataaaaacagctcaaataacttacaggagaaggtagaactcgacttccctctcataattaacaataaagaaagcattgaaaatacttatacagaaagtcagtctgaagatgaagaatcaaataataattcacttccatctataaagacttcagaaataatagataataataataataatattaccattatgagcgatttcaaggatgatcacctgccaaaggaaacccatttaataaaagcaatcccctctgaccataaacaacaaacccaaagtattctatcaaatcagaacagtcctgttataattgtccacaaacctttaaaagaattaataaataagacatatttggatttctttaacgcagatgctaacaaaattcattataaagctggtctttcaaagaacactgtagcttcattaccaagcttacatccagagataaaacgtaaccaaaaaaccaaatgatactcacctctattctttcttaattttttttaatctctttactttatgtatctttttttttttctttttttcatctactcgttatttatctcgtattaaaactaataatataacaattttccctagttatttttcaagtaataataaaacattgtaatgattacttgttcaaacaacaaatgatattttactccatttattctaatatcttacctccttcttgactttgttcctgctcatcttcgtcttcatctacatttatatctccatcaataatgctctcatgttcattataaaacgtcttccaaagtaaagccactgattcaaaatcctttcctacagcaatcgagctttctagcgatatattcagttcatttaatccattcaatatcgagtccattgtattgttaatatcttgaaggataatatttctttgttcaataaaatatttatctcctaatttagtagtattcatagtgtttgctatattcttattgatatccagatgagttctattgcttgttgcagtaaatgaactgttcattttctagttgaatgagattccacaatcaattatttttcctatacacacctacatgtatctgtacttctatgtactatataaaaatacaccagtgaaaccgattacataacgtttttattcattaatatttttcaattaattttttttttgttagacagaaaaactttatagagaaacgaattacacacaaaaagaatcagtcctgatctactaggtgaaaaaaaaaactttaaatgatatcctatgtgataatgctaggaaatatatcaataatctactgccttatttcagataaataacagcaagataatgcaagtaacttttgaaggaattaattacaaaaagagtgaaagttaaaagaataaaacaatatctataggtttttgtctctattttgtttatacttcttgaattttaaccatccacactattaatatatgcttattttaatcactaacatcgccattattactaaatctaggttctacatcgaatattagttcatattttctccattttttgcgtaactcactctgtgaattattaaactcagattctccttctttatcaaattcatcaagccaatcccaattaatatgaaacaattctttccccttcaatttcattgaattgttaataaaatatgttaattcatcttcatcaaatattaatggctcatctacagtcaaataattccataatgttaagaaataaaatcttaaacttttaatcccacgaacaaatcctaaatcttctacattgatgccattcttcggtggaactttaaatgaatttaatcttaatccttcttccatatcatccttagtgacacatttagcaaaatcaattatattgaccttaatttttactgttttccccttctttaatgtcaaatcaccatcatacattaacagtaatgaagcaccatataatctgaagcctttcaaatttgtcacttccaaagccaataaatctaattcttttattaatcttggtaagtgcctaacaatactaccaatttgttgaccatcataaagaaatcttgctaaaacccgaacaaactgccatccaacttttacacgtctgccaaagtatttatctcttttaatataataagattcattccatacttttaatccacaaatacgtacacctaatttacgtgatgtcgtcttttgacattttaatctctgggaccgttgcttacaagaatttgcatccacaccgtattgtcttgttcccatttttagatctaaggcacagggtttattcaaatgacgagtcaaatcttctaacaaaataaattttgatactattgtatcactctgatcttcaattacaatcgattccaagggaggaggagaaaattcattcatcaacaattcactatcacgtctttcacctgaaattatattatccaaatcacttatattattattatctttattattttctggattattttgtaaaagaaattgtgaatctttagaatcaatatctgctccagaatgtaaaatgttgtctctcaccgtagtcttctgttgaaattgttttaaatccatgactgaatgtgaactattgatagcatttgagatacattcctttttcaatttatgtagcaatggtgattctgattctttatctgtctccaccaaagaaatgtgggaatttcttctcattgaattaattggtgaactgttattgacagatgtggaggaagaggaagaagatcttacttttttcctaaactgcctacctgaaatagttctaactacaccacctcccaaattattattattatcatcagtgctattttttcttgtcgtgattggagcaaaaacttcttggatcaccaagtctttcaactttgtatttagaactgtggagcctgaatcacgtcttcttttaatattactattattcttatgatgtttaggtatctccgaaatattatcattatcttcaaatgttgttgatatataagaatcgtcgggcacagaactagctgttgatgatggtgaatgtacctgggaataagaatttgatggggaatttggataataatgtccccataaggaatcaggtataatatgttggttatcatcaattgatacttcgggtaaaaatgatccgtggatgtatctgcttctattatatttaactgatgctggttttgaattgttagacagaggaaatgaatagatatgttccagtggagctccaatattttcatccttagataacttagtttgtaaatattctgattctagagttgaatctaacgtacttttcctatcatcattcttttctttctgtggagtaggcacttgatttaaaaattcttctcttgaattaaaatgctgcctgacgttaagaacaccaatataacgtggcatgaactgtaataacttgttatttgttagttccattgtttcataccatttattttctctactgactaaagtcttacatactgctcttttagaaaatctaaatattgctgtgtgtccaccaactctatttgtaaatggtttcaactcaacagccaatgggtattctttatcagcatcatcatcgtcatcttcttcattatagtcatcattatcaactattttttctcttcttttacccacctcacttgatagttctttttcatcactttggtattgtgctcccttatctccgttattatcatcagttcttattaggacttccttctctgaagatgtcaagtcactattatcatcataagagttaggattggataactgattatgtgcctcatactcatcatgaccaccataagttaatttacgattggctctgcgactactcacactactccttgattcaatttttgttaatttttcaaatccattatctgtatttataaaatcagtgctattttcattatgttcttccttatttaaaatttttgatgtctttgatacagtagattttgatttatgtggataatatgtggcggaggagactggcttcaacataagatcatcattgaaggtatttgacgctatattatcttgattcatgatattcggtccagataagcttgctttttgtaaaccgacagttaacatggatttctttttatttgaggaatctagtctatttacaataatattatcattatcattattattattatcattaacgatatcactattaatatatttattatatgtattaattaaaatatcattagaagcatgccgtagatgatttaaatctttgttatcgtctatatattgattatctaagatactcactccactgtccaaatcaatcttctttgtattatcttcatcaataaccttatccctaccacttaaaccagtatccgaatcatgtttcaaaaaagattttggctttgttgtatccacgttattgccttcaatactttctctgaagatacctaaataagtggatgctttcctaccagagagtgccggaggtaatactctttcatccaatgtatttaaatcctttagggattctgtatgcttttcgttatgggatagtgatatattttctgttatatcactatcatagaccattgtcaatcataaaacaacaaaaagggagacgataaatatatccgtttaaaaatcaaatatataaatagaatgtatgtatttatataaattgaagtagaagttgaagatgatgatacaacttgtaaaagagaaaaaaaaagacagtaagagaagaaaggaataagttatctccaaatagtctagctaataactcttcggatgtaggtacaaagaatagcgaataaagtatatttgtggcgtccgcatacaagacgtattcttattcgatcaccaaaagtctaaattacttgaaattgtgaatcaaattcttctttcatattttcttttttttttaatcacaagatatttttcaccttttaaaatttttacatttttctattttttttttatttttattttttctttttcagatcaaaaattagggtttgcataaaggaaaaaatagggttgaaacgtatccatgattactaagcatagcaagttttctgtctcagggagaaggttattagtaattatgactagcagcagtaacaatgcgatagtaacgcaataacctaataataatgttgttatatttaaataattgctgttttaaatagtagctttaaaatagaatatgtgtgttggtcttttcaaatcaaaatacaatattaatatatatatatatatatatattatcatgcctctttgattcaacctctgtaatagtgtgtggaaataaacggcatcttagtgataataacagggaatagtttcctcctaacctctacaatcacttcagtgccaggtttatgcatgcctagattaacataaccctgtccaatattgacaaccctcttaacagtttcatctgatagacttggagatacactacctgaagtaacaatgccaataggttctaaagtgtccttatctaataacctagaaccggatcttgctgctggtgctggcacatcagatttatacctgaatccaattctggtttgtgaataattcttgttattcaattgatccattattctctcgtacccattaaaccttgtctccacattatcatccaaccttctacttttggatattagccatttcaaattaccttctacaggggttaacttttcattcaactcgttaccatatagacataacccagcctccaaccttaagctgtctcttgccgccaacccaattggtttcactgcagattcataggacaataactgttcactaaactcgatggctttgtccgattcaatagctatttcaaaaccatcctcaccagtatagccgcctctcaatacactgattggtataccggaaggtaaaacgaaagttttacgttgtccaaagaccaaattattcaaatcctgggaggcaccagatgctgaagagagcaatgcagctaagactttgggagatttgggaccttgcaacgccaatagagcttgattcttaatcggttcccactctacatctaaccccttagatttcaaagcattaacattttgtaagaagaaatccgaatcttcttgtattcttgatgcattagtaacaatatagaaactttgttgttcttcattatgcactggtcttttgaatatcattaaatcatctaggataccaccatcttctctcaaaagtacgcttaaagaaccaaatgtcggtttgatcatagagaagtcagttggtgtgatacgattcaataaatgaatagcatctttgcccgtcactttactttgtaacatatgagatacatcaaataaacctgcatgtgaacggacccatttatgcgaatcaatgtgattttgaatagatgggtacaataaaggcatcatgtaaccagcaaaaggaaccagtttcccacccagtttagtgtgtaagtcatagagaggtgttttcttaagttgatttgcagttgctgtagagaggagtcttctatcaattgtagatcttagcattatatgtaaaagttattattattattattattattattatcctactaagtagttaagtatatatatatatatatatatatatatatatgtgtgtgtgtgtgtttgtgcagtgctagcttgtagcaatgaaccttaacactttaacggtcaatttgtctcaagttacagtgtacaagggatacatccatatgtataatacttacattatatatatattattccaacctccacttctcacagacacacaaactttcctaactccatctgagtatcggtcattatttgcagtactgcagtcctctatcagctgaagataacaaacagatacattccaacttatttgtctctttccccccattcatccgttccctcaatgacacaaacgctctgcttctttagatgtgtggtgcacagattcctttgtgtttaactccctccaggcctcttgactcgggaatttaggagccttttgtaagactgactccttccctccaaacacaaacacaaaaacacgcttccttttttctgtcaagggaaccacaccatgtgactatgattggaattagaattacaattagaatgcaatgtttacacatatggcaaggcaaatccagagacctttgtctatgcgaagataaaactaaggtttttcgtatcataccaatgacacggtaacagaaaaaaaaaataactaagaagaaagcaaatcaatagacaaacaaacattataagtcttaagataaataaacagaggagataaaactaaaaaaaaaaagaagcacgtatcatctctggttccatcctttagttgctgtattcaccctcccactattctttctttctttctttctttctgtatttccttctatgcctctttacatttttcatacttctattttgaagctttgaactgttattatgtatatatctactatacacatacatatatatatatatagatatagtgtaattacaagaaagatggctaataaattggtcttctgctgtttattgtttatgacaaatcataatatctactcttctccaaatccataaattcaccttgaaaatcccataaaggttggtaattcttacaatctttcaacatgcttacagaattactgttgttttctgttttatttgtctccaaatcattaaatttaattaaatgagagataccagatatcagaatttcttcacccaacttttcatctgtagtaggaataatcaagtcggctgatgctcttgttggttggatatatctgtccatttcaattcttaaatgatccatatactcagttagcaacatatttaattcataaccttccagacattctttctctcttatcagattaattaatcttttatctgaatcacaatctatatatactttaagatccgaaaggttattgattcttttatcatataatgcataacaaccacatagtataataatatttctacttctacctctgcttctatttctacttccatcattcttttgtctatagagttcgttatataataattcaaaatcatagtctttgtaactgtaattttttaaaccagcctgatccttgttctgatacgactgatccaaatctataatattgaagtctgcatctggatatgagataagcagtctagctttaatatgtctagcagtaatataaagttcggtggcatgacctcctgcaatattcaccaataaagtcttttcaaccatttacaaatcctcaaaatctagttttctttttttttttttttgatcatatgccccatcttatattaaatagtactatttcatctcatctctccctttttctcgatacttcttttttttttttttttttttcataattaaatacagctttatagtttttttattttattttatttttttttgagatgagcttgatattatttttaaaaaaaacagtgcgatttaactatacagacatctcattcatgagataatgaaactagtctaaaaagaaaagaagcaggaaagaaataatcatacaccaaatagactgtcacaacaatcaccatatccccctcccatcctccccccaactctgcaacatgtcatttgataaagaatcagataaaaggttgaaatttaaagtatctaaaaaattacaaatttcaccaactttcgaatcaatggatttgaaatcacaactgctacacggtatatattcctatgggttcgaagcaccttcctccattcaatcccgagccattactcagattatttcagggaaagatgttattgcacaggctcaatcaggtacaggtaaaactgctactttcactattggtatgttacaagtctgtgatttcaagaaacatgagttgcaagcattgatcctttctccaacaagagaactagcatctcagataaataccgtggtctctaacctaggggacatgttgaatgttaaatcactcgctttggttggtggcaataaaatgaataaaactgatttaaataaattacaaaatggccaataccatattgtaagtggtacaccaggaagagtcctagatttaataaagcgtggtactttagtggtaaaaggttgtaaaatgttggttcttgatgaagcagatgagctgttaggtgaatcactagggtttaagcagcaaatttatgacattttcacaaaattgccaaagggttgtcaagtcgtggtggtgtctgctacaatgagtaaagatattattgaagtgactagaaaattcatgagtgatcctgtcaagatccttgttaaacaagatcaaatctccttggatggtattaaacaatatcacgtcaacgttgataaagaagagtggaaatttgataccttatgtgatttatatgattccttgacaataacacaatgtgtcatcttttgcaatactaaaaaaaaagtggattggctatcagcaaaacttttacagtcgaattttagtgtagtatccatgcatggggatatgagacaggaagatagggacagaattatgaacgattttagatctggccattccagagtattaatatccactgatgtttgggctcgtggtatagacgtgcagcaagtatcactcgtcattaactacgatatacccgaaataatagaaaattatattcatagaatcgggagatctggtaggtttggtagaaaaggttgtgctatcaattttgtcacgaggaatgattttaatcaattaaaaaatatagaaaaattctatcgtattaagataaaaccaatgcctgcaaatttagatgaattagcataaaattagattattataattccttttgtatacctaaatatatatatatatgcatgtatatatacttaggtatatatgcatcctaaaatcatatagaatcatataacgattgtaattgtgtgttttgaatattatagatatcaataagcttatttaagggaagatctttagctatatttgataaattcctgaactttgacaccacttcaatatttatttctctatatgatgtttctaaggatttcttatcttctgcatctcctacaatatcatattttaataattgatatttatcacttatcaaattaagattcaaaacatgatgattctcatccatgtcaaaaataataatattttcatagtctaaatcttcatcatctaatattatatcaccttctacgctattattacctctttccactaaatcatcatcaaaaatatatttgattttgttcgggaacatatacttagcattgcaacttagttgatctgatgtgttttgaaaatctatttttgaatctttttcacaatcgcttattgtatctccttcattaaaatgatgttcaacattgttatccattacagacacaaaaaaaggttccatgatggcatatattatttagcctgaataatgaacaaggtatattcatatttagattgtaacagttgttcactccaataattaataccaatatcccacatttaggtatttaaagtaatcagaacttaattgttcaaaaaatcagacagttacgaattagtttcctaaatactcccctttttgaaaatttatatggtcaaagcttgtcaaataaaaataagagataccatacatgaacagtgagggtacaaacataaagaacagaatgaactcaaaaaataaaggaaagggacaatcaacagaaagaaccaagaacaaacaatcatttatgtggtattatatcactctgccatgttggtataattatattttcgtattacatccaaacacataggctaagtctatatcttatacctatccaaataaattaacatcaaaaactttttaagttaaccattcttatgatatgtgttacccttatgtctcgatagccgatcttgtaaacttactagtcgaagacggtgttctcacttttttcttgtttataaacaatatatacatctgtatatctattgacctaaactatcccatatatatagtagagtttatgtatcatatataaagaacaaccaagaatcatttatctaatcttacattctagaagagtgcatcttttgtaacaggttcttatcaattatatttgatagcgttctagtttagaaggacccagcagtattttacgcacttattttatttacattttcaaacagtggtctagtgtttgaaggtgccagaaaccaataaagtcacttctgatattaattacacgatgtcagctgatcaattgaagactcttatagttggtaatgacaaagtcgagtctccagatgctatttaggttctagggtccagtgtttcagtccctctggaaccactactttggttcaccaagtttagcaagactctagggtctaccattgcttttgcaaataacaagcgttttaaccagcaattgccagccaaagagacaccatcagttgcagactgtgaaatcatcagggatttaactaagttggtttccagcttctcgggtgctacaacaaatgaagggaatgttatgtacgctagatgggaaagcgagttaatgaatttttttaatatgtacaaagacgagaacttaaacgataaatataaagtggaattagcaagcttaactttgagagaaagtgctttaggttattttagagaaattgaatcttcagttagctctgttgaacaattagttggtttaatgggtaaaagattggatactagattaaataagctacaggtttatttaaaattacaagctttgtattccatttcagatttcaaagagcttgccaaagctatcactgaagtagaaaacaaggctcctccaggatttcctcattgtttttacattgctacatttttagttgcatcaccacctgaaattagaagttttatgtcagctgataatattgatttgacttcatcgtggcgtacttgtttaaatagagctagatgctatgccagtaacttaggtatatcaaatagtatggtatcaaatacaggtagaacttatcacaactttctagcaaaattggtgagaaatagtcataacaataaagatgattcttagtcaattaggtgctttaattgtaataaaagaagttacatgagtacattgtatccttttaacaaactatcacaagagtcacactctttttgaacataaaattggataaataattcttggttgttgactatctgtatataatgtataaactacgttgtatgtacaggaaatattacaagtaaataaggctcaagataaatatacaatttataaataagaaaaaacacaagaatgttgttgtcgcttgaagtaaaaagaaaattcgcacgattgtttgtaatgatactataggacaatctatgtcacacctccgaaccatcacgatcacctcaatagcagaaggatcaaaaaaagttaaactgatccaaccgaggtttgaactcgggatcttcgccgtgtaaaggcgacgtcttaaaccactggaccattggaccatactccaaccgctcattattatagtttgggcttagggctaattctttaacaggactattgaacgaatagtaagggcaataacaaatatataagaatgttatatataggaaaattaaggattattgctttttttctatttacgtttatatacaacatatagattatttacgaaaaaactgttatggaagatgatcttttatctccagaaaacgttgtccttttatatgttttctggagctcgatcaattattcagatttgtatattaacgagcttagtgatccaaaccctaaattttattacattaatttaggtgcactagtggattagaactgcaccccaattctttaatcatggtaattgttattattctattctacagcactcattactgcataataaaaagcttagttccattaagattacataagattttgactgaatctagaactattcattgctttaataagccacacacttattactaatgattataataattatgctgtttatcattagtacacccaattaccataactagtaaattgaggtacagttactaattcactagtacaccttaattattataataaatattagggtttagatcactaagttcattaacgtatcaatctgaataattgatcgaactccagaaaacataaaaaaggacaatgttttctgaagataaagaaccatcttctataacacttttcttgtagataattcatatattatatatatacataaatggaacaacaagcaagtaacaagcaaaatgacttcaaataaatatataagctcgacaaagctgctcaatgaataagatcgtttttagaaattatattatcgactgtattgattcctgtctcgactatttgaatacttgttaataatatttgcacttccccgaaatatacaaaagaatttaaccacaccgtattacaacattcgtaatggtaattctagacaaatactttaaataattaaatagttgagggtgcaataataaattattatataaatgcaacagctggaattccataacggtttttctattactttttcactttattttatcttatacaatattttgtatacatttataaataagacaggactacaaccttgaatattaagataatattcttctgtatataaaattgtgtgttataaatactcttaattagcttctgttatagttgacaatagttcttgtaatttttgttgttgttgtttttttgcttgaatagtttaatgtgttattctcaacaaattctgatattcaaaattgaagatagaataacctactgaagaatatcacaaaacccaaatcacctttttcaatttctaattgacttatattttaaattttagttagctcacaatatctccttttatgtaacagaataaaaaaaattactcaatcagggaaagtccttttcaggatattggcagattatttattaaattattcaaattatttaatgaataatagtaataaatatagtagtatattactatgtaatatatatgactatatatatcaatacgataaacctgatgctattaataattttatccttattccattatatcacattgccttcaccttatataagctcgaaagtatacaacacaaactttttttttctataaatcttcagctaaacttttaacctttacaatatttattatcactactcattttgagcattcaaaaaaaaccaatataagataattaaaaatgatccttaaaagaatacaatctatagaattttatttttaaaaatatatagtaggaactaatcaaatatggctactaaaaaaaagaacagagaagcataatatttatagaacttgtgattaaaagtgtagcaataaaaaaaatgaatgtttttagttgagaattttcaattttactgatcaatctttattttctatgaactcttaagatttatcaaaaatttatataaaataaagagcatttttctcattcaagttctcttatttgttaataattatactttcctgttctttatattaattttgcatttttttattaattacataatgttaaataatcacactttttcaggttcttctttaatctataatggtgtttttatttatatcattttttattttttttttttttttgctttaatatttcagttgttaattacaacatttcttagctatttaaacttcaaaggcgatgagcaagtagttcaactaaaagaaaaaggaacaaaataagaataagtctaatttttgagtgtatccaatttcgatgggtacaagagttggccatataactgatcagcaatacaaatttatctaaaatttcctatacaaatcattggaatattaaatcatttttaatattgtatataaaatagaaagtatcagaaaataaagcaaaaacactaaatccaatagtatgatttcagtaagttaacttaggttatttttttaacatccacaatatagaagtgttttatttttagttccaatttatttagttagagatgtttacattactcaagtagaatattcaaatattgaaccttattattatagaatactttcatttttttgatacttgtgtaaattttttacaaaacattatgtacacatttattttcatactaaaaaaaccttctaggccgtacaatacaataattcgaaacacacataatacttattttaactaagcataaacatttgttatagcattatttttggtattctctataattcatatatcattgattgtacatttgatctaatctctccagcagtgtttcgaacatggaacaattcattatgtatgacgactgcctttagtatataaagacatatacctcaagtattctggcaaggctgtagccttctttttgggttttttctttttttctttttcctttttttgtttgattgattaacctcgaaatctatttttgaaaaattttgaatgtcgaaagaaaaaaaatatacaaaaattgtaaacaaagtaatggaaagtaatgttgttgaactctcaatattgtcgaactacgttctgttgtttaccatcgatattttacaacatagattcggtaattgcttatatttcaatttagatatctataaagggggaaaaaagaaaagagcaacagctatatatatatacatatatatttgttacttatatcaagaaactggggctatacttaattcaaaatgttagatatcaatctttttattgaagaaaagggtggtaacccggaattaattagacaatctcaaaaagccagaggggaccgtgttgaaattgtcgatgaaatcattgaagattacaagaactgggttaagactagatttgaattagatgaattaaacaagtctttaaacaaattgcaaaaggaaataggtttgaagtttaaagctaaggaaaatgcatctgcattattagctgaaaaggatactttaactgctaagaagaaggaattgactgaaaaggaacaaaaggaagatgaggacttaaaaaagaaagttttctccgttggtaacattgttcacccatctgttgtagtatctaacgatgaagaaaacaatgagttagttagaacatggaaaccagaaggtttggaagatgttggtccagttgcctctgctactggctcttcagctagcttatctcaccacgaaattttattaagattagatggttatgatccagatcgtggtgttaaaatctctggtcacagaggttacttcttaagaaactatggtgtcttcttaaaccaagctttgattaactacggtttgaactttttagccaagaagggttatgttccattacaagctccagttatgatgaataaggaagtcatggccaagaccgctcaattatctcaattcgacgaagaattatacaaggttattgacggtgaagacgaaaaatacttaattgccacctctgaacaaccaatctctgcttatcacagtggtgaatggttcgaaaaaccacaagaacaattgccaatcagatatgttggttactctcaatgtttccgtagagaagctggtgcccatggtaaggatgcctggggtattttcagagtccatgcctttgataaggttgaacaattcgtattaactgagccagagaaatcatgggaagaatttgatttaatgattggtaactctgaagaattctatcaatctttgaaattgccataccgtattgttggtatcgtctctggcgaattaaacaatgctgctgctaagaaatacgatttagaagcctggttcccattccaaaaagaatataaagaattggtttcttgttccaactgtacggattatcaatctagaaacttagaaattagatgtggtatcaagaaaatgggtgacagagaaaagaaatatgttcactgtttgaattctactttgtctgctactgaaagagccttatgctgcattttagaaaattatcaaactgaagatggtttggtagtcccagaagtcttaagaaaatacattccaggcgagccagaattcttaccttacgttaaggagttaccaaagaactcaacttctaacaaaaagaaataagcacattaattatgatgatgatgataatgttattatcttcttagatttttaaaaaggaaaaaaaaagacataaaaaaagataaataatatttttaatggaattgtatgtatagacatatatctttgtatgtacttacacaaactatatttttttagatatgattttttcggttgttaaatattaaattgcaattcgtaaatgtactagttagcaacttttgtatgtgaggtaaaatagatatggtattattaggtattaaaaacacattgtgtaacattatgttttaacaaacataccaatgggcagattcaatgcatgactattatcttcgcaagaaacatccacacacccatatgggatcttttttttttttctgatttattttttacattttttttactgtagccatattaccgtaaacggaaacagattacgaaaaatgattattattaggtgttttctgatgtctcttttgagaaagccattctcaaaacaactataacaggtagcaccaaccccaacaagaaaaccgcgccgttctctttgactgcagtttttcttctgcttattcttctgcttctttgagagagggaggtgagaaccaggttggtctagtagaatggattagttcacagaaagaaggaagcaagcttcgctgggcacagtgttgcgggagctggagagtaatccttggaaggtaaagattcttctctcttccctctatcgtcacttcccttccttctttctctttttctccctcctccctcacacacaaatccccctgtagatacctcttcttttaccaattccttccccctcatgttgcttcttctcttccttctccttccggggctccattcaccggagctacaaccataatcccattctcttttggccccgtcccaccatccaattgagttcagtccaaacagtttgtacgctagtaaggtagagatgaggacatcaaacaatcgggggaggacaacaatgtggaaggccaacgatcgatcgaactaaacctcccctatctatctgttgtctgagactatacgctagacgttgcatattgctgatgcttgtttgtagtaacgtaagaaatagtaacaatactaataatgatagtatgcaattaggaaggtttcataaaagtatttattgtcttgttacgtagaagaccctctcaatatttgataccggttttccacttgatacgttgaccaaagtaaaagataagtaactgccgagatgtccactgaattgaccgttcaatctgaaagagctttccaaaaggtatgcataaaagtcgcaataataaagacgctttccttaaataatgtgttagcaagatccaatgatatccttcacgggattaattattttcattttatttgaaggacatatttgtttgtttgtttgttcaaagataactggaatattgaagacgatgagtttaaaaaagcttaaatatcttttttctggaaattagtatcaagaatatagaaatgagtcggttgaataataaacatattaatattatcctattttaatgtcaagcaaatttgtgtatgaagcagcgatatgagtttttttttgatatataagtgcaactaatatcaggaaactttgtctaacacagttttcattaatattgagtcctcgagatactaacaattataaataattctgccaattcgatttatcgaatttatttcctttctatcttttttatttctttgatttgttaacagcaaccacatatcttcaccaacccaaaggttaagaccaacagaagaacaaagagatggtacaagaacgtcggtttaggtttcaagaccccaaaaaccgctattgaaggttcttacatcgacaagaaatgtccattcactggtttagtttctattcgtggtaagatcttaactggtactgttgtttccaccaagatgcaccgtaccgtcatcatcagaagaaattacttacattatatttccaaatataatagattcgaaaagagacacaagaacgtcccagttcacgtttccccagctttccgtgttcaagttggtgacatcgttactgctggtcaatgtagaccaatctccaagactgttagattcaacgtcttgaaggtctctccagctgttggtaagaccaacaagcaattcaccaagttctaagtaaatggtacgataaaaaaatataaaagaggattgtatagtaatatctaacctttaattatctatttttttattttgttattattattatcataattattttattatatttacattttatttatacaagaacttgactggaatttgctgcttcttattccacctgttatctcacactctaatacatatacatatattgaatctctttatataatgtattgttagaaaataaacaaaaaataaaagttaaggctcagaattaattattagcataaatattttccttatacttatatcctttagttgaaattatgccagtcgctagtttactggaatacttcgtggagtttgattaaacgtggcttcgaatattgtttagaatattgttcatataaagataatttatatctaacagttatatatgactagaaatatatacattttcatgaatatgtgtcttaggctcaaaattttggtacagaaactaataatgatatttttctttattgatctttttctgtgattatattatcatctagtaaattttccaataatgacttagcaacttcattaacaggtaattctttatatgatttgaccatagttctcattttttcatagcatattttcaattccagcccagcccattttgtaccttgaagacttgccaattcatcccaatccacttgtgattcatcagtaaaacctaaatctctcaatttttccataagccatcttttctctgaagtagttataagctcaatcttagataaagcttgtttcttcattattttattccacttataccgacattggatgcgtgacctggtacctcccattctttcactgacaaccgtccagttgatgacatctttaaaagtgggcttagcgccaatggttttgtagccaggattttttgactctccgttaccttcattatttgaatctgtagttatttcattttttttgtcatagtatgcctctgcttcttctaacattgtagcaataactctctttaacatagattcttcttctggagaccatttattggatatacggttgttaccgcattttatgtaatttctccaacggtctctgcaatcttctggcattctatccattattttgcctattactgaccattgtccttctttatctatacacaggtctgccaactgttgatcttcttgaggtgtccatttacctctttgttcaaagatatgataccttcttcgaacatgtttgtaaatggaacttcttgttctataaggaagtactttacagatattgatccaaaaatcatccttacgccgtccattagtccaaattctttcacatgtttctcttctggtaaatttcttaatagtttcataatctttgatgaattgatccaatgcagcttcttcatatgcatcaaatgctttcccgctagtttgagtagatgctagagagcctattagctcagacgcttttttggctgcacgctctaacaacatattatctgcatctatggtcgcttgattcaccttttcagtgttagatttctttttatgatttttattggatgacatattgattatagtaatcggtggttctgaagatatctcaggaaaatcattgaagactttctgtgacaagctttcctccactggttcagattcagctgttgtttttaaatgtttcagactcctactgttaacatgattgtcatccatatcgtgttcagtaagtttacttaagtcatgattcatgtcagtttcagtatttaaatattgttggaaatctggttgttgggatatcgaatcagcttcttcaatagctttgttaactaattgatgttgtgacgatggatcatctaaagtagttaattctggatctactagtaagcgggacttacccctctttaaatctacacgaaactttttcactatataatcatcattaatcgtatcaccttcttcatgatggccatttatcttcccccgcttaaacgatccactgttatgtgggttctcttcagccattttatcttgatggtccgttgttacatgcgtatctataaaatcttctacatcatcatttttccttttcaatttatttaatttatcagcttgatatgcagcaactacagcagctaatgctaatgtgttttgatttattgaatcttggttattttgtagtttcggttgaacatttgaggattctgtttgatttaagttggtagttgtcatatcttcatcatgccttaaataccatgtcatgtcagaagcattatcgttactactgctatgatctttattgttgttttcgtcgatctttagatctgtatagttagtattattgtcctttatatcattactattacttgaacttatttcaccgtttagatgtcgagacgacacagatatctctgtaaaagtgtatttttcatttttagaagatttttctctttcaatatcagatttagagatttctttattcacgtcagttaattcctctcctacgtattttaacacagcttcttccacagtttcaagaggagaaccatgtttatcagataatttatttttgatctgagccgacatcgttatatattttctaaaatattagtatcatgcaaactaattatgcaaaaatcaatgaaacgatgcaaaagtttattcaacttaattttaattattgctgtgtttggttcttttgctattttcgatgttaatgaaatcgaattaataatataatgtgtactaagtatttggccctaatttgtgacacctaaattacttattctatttgtttatcaatctgttaatcaattctgctttataacacctacaaaaatctgtttagttaaaaatactgataacaataacaataacaataccacaactttgaatgtgtttaaaaattaagagtgtcagtaatagatggatatgttatccatggaaaactgtaatagtagagttagcagtgctagcactaggtataaagcagggtaataggcatgtgagaatcgatccttgttattattataaatcctaaaaaaaaaaactaaggaaaatatcttcattttgtgacaaaaattcccatctcccatttcattcaaaaagccgaaagcacaaatttcttttagtggtaagaactttattttttttttcttatgtaatatgcgaaccctagggttggacaaagtagtcatgtggtttcccgtctaatatgataacaaaatctgcatttccttagtggtcaattctaagaaataataagggcatatcaatacattatgtgttaggaaaatgtgcgacagatatattgtgataatgttctcagatcttgttcgttatgtttaatgttaggttatttattggaattacactggaggtggtggtggtgcatgtgctaaatagattttctcagaggcactgtcatattgtcttattaattgattataatgtttgctgtcaaagggaacaaaatctttactgttatttccttgtcttgagaagaattgttgaacaattactataaactcacggagacaatcaattgattctcccattattgataaattcttcccttgagccgacatcgtttggtcttgataacttgtaatagaggctaaagtatagctattaaaatatttcagtagattgaaacacattctttcaaaatatggtaaataacttgatggtaaattagttgacaatattaatagctctcttattaattggattacttgtaataaagattcactagcaacaaatgttttgtctccaactacaacagactttctattgccagtagatttgtttatttcacggctatctgattcgctgttttgagcctcttccttatcatttttttgatataatatcaattgggacgtccagttgattggatcaatatcaatacttgaaactatatcatttacatcggtttgaatactcgggctcacaatagcaggtacccaattctctaattcgattttcttttgtatacttctaagatttcttgaatcatgtgtcgtaatgtaatgttttatttgggatgataaaacatcactgaaatatttcgtaagaaattctccacttagagcttcacattcttgaataaatagaatacagacggaatatagccgtaaaaaatggtcatgtcttaaagtagaagtcagttcttttcgaactgttataacttttcccattcttagttgtactattctgataatttcattcacgttagttctaatatctaactgattgatcatattatgttgattctcagagatggttgaggtgttaatcaccttcaaagaaatatctaataataatttttgctgttgatataatcttttaatagcacatagacaatgaatgaagattgattctaacatgtcttgaaattctactggtgtttgttctttaatcaaagtagatagttttgatctagtagtgggtggtcgtgttgaagtattcatggaacctgtcccctttggggtcactgattgagatctatccactaccaataacgacgaatcagatttactaatattctctttaggtaaatagtatttgataatatttttcacttccgtggtaatcttatcttcatagagcgcaaaggcactggttaattcttcacactcattcaatttagtaataatctccctaacggaggtttcaaaatctgttggaaacttaaatctaacattttcaatttttccttgttgtatatcatttataacagtgattgtgtcaatatttttataagcacttcttaaatcttctaagagtaactctgataattgaagagaatattttccaccgacttcaattttcatatttgttaataactctcttatctcaataagacctaatactgactttaaatctataagtggaaatggccaatctttagtccagttttgaacattttcatctgaagaactatcacctcttattaacagattaatagattgaatcaacgacatacattgttctaagttatcatttgaaaatttatgtttacactcctctgtcttatcaacaactaatttcacttgtagtaaaccttgttctaatttctcaatgttatttctctttattataagctttatatttttaattttttctttgatttcagcatccaatgatatttgcaaagttttctctaacaattgtaattcatttatggtactttcaatattattttgtattgattctacatcatttaacgtattgaaaaacttgtgagaagacctagatatattactaacaagcaacgtttccacaccgtctaaatagttgcttaatttgtcttttaggagtaaatgaaattcatctcttttgtttttatcgtttgtcactaaatcttgtggcttcaaatcaacactctctattactttattaaaagttctctcgttatccagttggaaaactttctcaaaataaaattctggaatctgatttataactatggaatcatcgtgatatgtatctgaagattgatcatctagttgtttaatttgttctaatttattcatatttgttatattattcctactttgaaaaatagtttcttcctcaccaatgtcctccatataatcatctacaatcttattccaaccgtcaataatatcaagcttgctcactgtaacaggggggatatctaccgaagttggagatcttagccaatccttccgccttgtattcatcacaatttcatagatagaattgttccctaagggtgagtaatcatgagatcctgattttgaatttagactaaattgatttctgtgctgcccagtgaaaatagtactatttgacgtatatcttgaaactgtagattctatactgggtctagagagacttatagaggtcctttcacttgtatcatctgaattagatacatgtccatctattttgatgtttggaacttggggttgtgttggcattgttaataatctcaataccagtgttaatgttagttcaaaatattggccaattcttatttatattaagtcttatctagaaaaaaagctgcataggctttttataaccaaatttgttatagttagacacacaattattgagtatctttaaaaaatcaagtcttttgatatctggctactgaacatttcagtagccagaaaaataaaactaatgatatatatcttaaaaatagagaaaaaaataaacaagaaaatataaacagcgtatttctttggtattacaagaaacaaaacagcataaagtttgtatgtgtttataccttatatatttgcttgcagtgaactgtgacaataaaataattggatgaataatagatttcattagaagtaaagaaggctatatacatatataaattacgtatgatatattgatagtagaaaatttgaggtcattaaaaacacaattaaatattatgaaaggaagaaatgtgctgtcaacattcaagtttcaagagtgtcaccaatataattcctaataaatatattttctctcttgggcaatgtcttgaataaaatatgttatatgataaaaagaaaataaaagaaaatagaatagaatggaattttttgtttaagataaacccatgattgcttgaaaagtagctagtgatggtctaattgtatgaataaaatattttttgttagtaaaatatttagtgttgattatttttcacatggtagtttgttatttttttaagaattattgtaattggtcaatttctcctttggcatcacagacttttcagaatcatttcgtggtggaaatgaaccctcaatggtaacattattaggtgaaatatttgtagaagacacagtgttgcttggaattttaatagatttgtctatattgtatttgcctgcttgatttatattatttagtaataagctacttgatgatctttgtggtggacccaattttctgcgtgggcaaggtttaatctctaatgaatttaaattgagatcacctttgtgtgtttgattgctattattttctttcacgtctgtgatacatagggcctcgtcagattcctcttcactatcagaactaaatataaaccctttgctggcatttctacttaacggtatttcatttttattttgaaaagtgtcggctagggtgttattgctgcttttagtttgtctagccaatgagctaccatttagaaaagtttgggagagagtactttttagttgctgatttgagttattatttaaagacaagccaactaaagaattattgcttctaccaattgatacagttctttttaatcccaaatcactattcacacatttagatcccatttgtaaatagtcttcattatcactagagcttgaatctgatccactattagagctatgatactgtgaatcctcgataaattgatcatcatctgtattggaagatatactatattgatcgtcaccactattatagtattggtcattagaagtggctggagatagaagagctgttggttgattcgatttggtatcggatggggacaacaacttataagtttcttgattatcatcagcaatggctgtttgtaaatttatcccttctggaacatcaataatatcgcatggatccactggtaggaaacttgaagtgtcgccagtataaacagaattgtaatcatagatataatcgtaacctctttgtgtattgacgttatgagagatggcattaccataaccactattgaaatcattattatcagattcatcatctgaaccataatttagagtagtagcaggtaacattttaattattggacggatatgtgaattatgcctaccgctagtacaattggaaccaattgatgaattatctgtaataggtgaatgagctaaggaatcaagtcttctggagaatcttgcactaataaaaagaccatgttcatcatcattttctccatcgctagaatcggaatttgactctgaattggagtaatctgaaaattcttggttataatcatcgtcggaactgtagaatccactttccatatcttcatcacttggattactagggtatttaacaaccatacattgctctacacgatcattaaaatggatatgtctatctttgtttggtttcttaatattattgttattagaaatgtctgttttatcattattattgttctttgaacgaaagcccgatgatgtggtcaatattgatgataatgtaccattttttatgtttgaactggaattgtcctgtgaaactgtatatatatttctatggtttgaatttagcacagtgacatttgatttagtaggtgaagttgagtttgttatagaggaatcattagcttttttatctttttcatcagaaatatttaaattacctgattgattggttgtataagacggtatatcatacttggcatttgaagagtttgcttgagtatcgttacaggtttgactaatattatcattattgttgttgttatgatttgaagaatatatttgttgttgtttattggaagctgtatttgatgatgatgaagatgatgggtagttgaaatactgggcattgacctttgcagctagtagatcatagtcatcatgaacattagtctgaatatcccgattctttatagactgagttctcctaacttcattgaaatgttttcttgcttcattcagcctccattgtgcattttcttcgatgatttcagggactgttcttctctttaagataggttttggcgtaatttctcttcttgaagaatgaggacgcctacttgtagtgttggattgattaactattgaggaatttgtagaaggtaatcttattgaagtttcatcaccatctgaaccatatcctctttcataattgtcgtcgtcgtcatcatcatcatcatcgtagtcatcatcgtaatcatcattgtcatcataacggtagtcatctttactgtgtattttatttcttttcctatgtgaattgccactactgttgttgaaattatcactacgaacaattggaccatacaaccaggttacatcagaatcctttgaccaattcaagatttcaggagacacagtctttaaattatttcttgcctttgcccatgttctccacgaggcattctctaatcttgcagtgttgaccacgtcgatatctctttttttcttctttgcaatgatatatttccaagaattcgaaatatctgattctttccaatgatgtgacaaataatccacatgtctctggggttctcttactacgtcgttgtcatcttgtggcaacagtttatcatcatctggtgcgggtggggatacagaggaggactgcgtgtaactgccgacgttaaaattatcctgatcgtcatctcctgtagtatttccattgttgagcactaaatcgtcagagatattgctagaggagtcactactattactgctgatatcactgttatttgcatcataatcataatcatctgaatgggcatcgtagtctattatattcggtgtaggcagttgttgtttgttgttataagtagtagttgtggtagtagtagtagatctactattatttttagcaattggatttgtgggatctaataaacccatggattgggttcttttcaatttaaatgttagattatggaaatcttcatcattgtctgcctctatagccatagatacagatggacccatatcatcatcatcatcatagagactattactagtggtggtatggttacgtgtgttactattgttaatgttgttgttgttattgttatccgtggtgttatttgaactagcaaaatatgcagctaaattatttgacatatctgtattctaatattattataaataagtgcttattgtcaatttatattcaattgaatagggttaaaatagacaacaaaagaaaagaaatagaaagtggaaagcaaaatatagaagcaaagaaaggggaatgagggggaagatgtattggagttaaataaatgaattttagctggatgaattgatggatatgtagtatggatatggtaaaaagtaatactttgttagaagtgaaaggatcttaaacgaacaacagatgaaggtattataaaggggaggggggaaggaaatagactaaaatagaaaaatcctggagaaatcaaataagttaatctatctgtcgagactaactttttgaataatattacagatagtctttaaatttgatctattgaagtatatttggtattattaatactaataatactttttgttttttgttttttgtttttttttttgatttattatgtaaagaatgtatgatatcaatagatttgatattaatatatatttatggaggtttcacaatgattcaagtaaaggtctagtcaaagaaagtggcattaatgattttttttttaaaaaaaaaaaaaaaaaaaaaaaaaagagtctcgcgattgattcacctttgacttctttcctttctttggctttagctttctctctttttttcctctctcttctttctttcgcactctttatttctctcttccccctccttcgtacagaactacaggaaatatgagtagggagttaagaaaaagagaaaaaaaaaaagaaaaagaaatttcaatgtgagggggcgggggacgatggcgagaggtaaaaaaaaaaaactgcggccgtagccagtaggatgtctgggcgtcatactgtttgacagcgaagggcgccagagtcaaaaataattaaaggcgggggtatgacaggagaagaacacgtcagaaaggcagaagttgtagagagatgagatggcatgataagacatgacatgatgattggggagtggggatggtctcagaaggtggcagtgtctaccacctacttaatagataatatgcttgtacgtataaatatatgtaggtatgtacgtatgtacgtgtataagttgttgtagattggaaaggaatataatagagatgaaattatactaaatctttggaagagatgcaattagacatgtatacttttgtccgcatattccccgtgttcaattcgtaaatctatcttattcaaacatatactttcttttgatattaaagatttgcaattctccactagccaactggtctttctatttgggctccctattaaaccattacatttgacaggagtaatattttctctctattcatttttgagccttcttgtatgttcttttattacatttaaggaagtcttaattttgcatcgattaaatctttttgcaataatctttttgtctttttcttttttttttttttcccaactaatagccacagattaacaacttcattgttatgattatttaatggatatatatatatatatatatatgtatatatgtatatgtcatgtatacatatatatgacttcatagaagaataaaaaaaaaaagaaaaaagaaggaaaaggtccgagaaggaggaaactaaatgaaaatgtaatattaaattagtttgaataagtattcttactttttaaaggaaaaaaattatgaatagttatacatagttatgaataagtaaatatatatatgtatatgtatacgtatgtatgtatgtacgtatgtacgtatggaggtatattgatatttattataaaaagaaagtcatggagaaaacagatataaaatagaaaaaaagaaaaaataaataaaaaaaagacgatcgatgaatatgatatagaaaaaggaattaaatgacttagaacttttgaacggtttcgtagaaggttttaccttgaatttcgtgcattcttaattctaattcagatgggtttctagaaccatcagcaccagcaatggtaccagcaccccatggagaaccaccatggacttcatctaagttagttaattcagcaaaggcgtttttgtaacctaatggaacgtagatgataccatggtgagccaaggttgacaaagagttcataatggtggcttcgttaccaccaccggtacctgtagaaacaaaggcaccagcaactttgccgtgcaaagcacccttagcccataagccaccggttctgtcccagaaggctttccattgggctgggaaattaccgaatctagttgggataccaaataagaaagcgtcatattcagttaaagtttcacgatcggcaattgggtagtctggttttggagcaccacccaaggccttgacgacttctggggttagagtttctgggacttggaagatatcggcttgaccaccagcagcctcaacacctctcttctcagcttcagctaacttagcaacatggccgtataaagtgtaaataataatagcaacctttggcatcttgggtttttaattggaatatatgtatgtatgtcgtgtgtatgtttatttgggtaaatgagtttaattaattgactgatcgtcctacactacagattgtgaatacttcaagtagtatgtgggcaagaattgttcaggtactatcaagataaaaagaagaaaaaaagggaggtcctttatatatattttatcattaggttgtcacaacaaagtaactgtctgtaatatgtgtatgtgtaatagctatggagagggaagggggggagagaagaagaagaaaacgaacagaagcccgggtgtaaaggaatgaaaaggaaaaaggaaaaggaaaaattataaacttgtttattattaagtaatttcttagctaagattatcacataattattgagtaataaacaccaaccgccgccacggatcccattgtctttgttccccacggtctgtgttaagcacagaataagaagagtaggggaaaaacaaaaaaaaataaaacggaaaagatttgtgcgggtagtggatggtttttttctctttaaaaaaaatgaataaggctggagataaattagggtccaagcaatatttctagttgttttttttttttttttttaatacaaagatttgaaaaaaagtggttgtttacaaagcaacaagaaaaactttctaatttcatcaactgatagggttattcttctgatgtgttcaaaccattttaccaaaaactggtttttttaattttaggttattgcatgggttatctttttcactgctctcaaattaattggaaaaaataaaacaaaaaagaaaaaagaaaaaagaaaaaagaacgctaaaagaaagaaatgttgggagctggaataaaaacagaaattgggaagaaaaaattagaaggagaaacaagaaaaaattatatatatatataataaaataaaacaaagactttaagattgcattagtaatgctgatagataaaatgttatgaaacctttgttatgagtactctttatagttatgtatttccaatgttataaattaaaaaaaatagtaggttgtaaaagaacttctgtagcgtgttttattgtatttttttatagtatttttggaaacattataaatttttcataaaacttatataaaaacttctctgaacagttgcatgtgtatatagcattatctttacatcctattgagactcttgtatgaagtagagtcttttattactagttttttcttttttttacaactgaaacaaataagtaaatctactttcttattcaattaaagaaatttcaaaacaaaatataaaaagattttttcagttctactctatatattttagataatatgcagatagcatcaacaacaatggtacttttgctgactatataatatttctcttgaagaatttaaaaataaaacttttgtttacaagatatctattcagaaataaattaataccattacctttcgtttataataaataattttaaaatatatagttacaatcttcttttttttttatcctgtttaaataaattaattttaatcaaaaaagaaaaaagaagaaaaaaagtgaagaataaaactatttcgtaattactattgttaggtgaaacttctctattatacttggtagatttaatgcataaaggccattagttaaataatatgtatatataaccatgagatatcacaatgaaaatattttgttcaaaaattggggctgaattaaaatattttaccaagaaagtaccaatcttaattaatttgcgtataatgccagtaagtccggtatttatcttataaataaggtatttcctaatggacattattttttgacctccaaaatcatataaatttatatttaacatcatactaaaacaataataacaacaaacgttaaaagttattactaaataataagaataagatagctttaaaattttgtatatatatatgtatgtatgtatttatatatgtatgtatatgtataatacagaatcactttctttattagaaatttagataatcttcgcttacatgaagcaataaaggatctttttggaacgactttcttttttttttaactcttcaagaagaataaaatataaatagaaggtatgaaccaataaggtgattttatgctataaaaaaagttaattaagtatttgggcattgaaattacaacttaagaaagagaaaaattatattgaatacgtaatatgtgtatctttgagtaatttacaacttaaatgaccgtctcaaggctgttgctacgtttttttaacaatgaaatgtttcagatactttaaagatctaaaaaaaaaaaatagcaaaaaaagaaacagtataaccgttggttcagttaactctgaaagggtcttctcataataaaattgttatgttggataaagaaaaagatttgtttattcttttttttactctaacaacctggataaaaacaaagaaacttaatttttgctattcgttttttttttgcttttttttaaaaaaagaagcattatggataactggaaagtgcaagttggcagaatacttaaaaaagtatatagacttgtgatataataggttcatcgacttcgtataaattaggcaggtgcaaggaacgaaaaacgatcattataacttttcctgtcaaaaattactttacttatttataaaacagttagtattttccttctatgcaactaaaatctccttaagaaaagtacttgtaaagacaaatgtaaggtgttagaagattgtaaactgatcattttccaaatctagatgttgattgcttgaatcacgccacaagccttttcgtaatactttcattacatggagatatcatataaaaattattacgcatgatagttaaaaatttgatacacctttgacaataagcttaaaatattcttttgctcaagagatgcctgtcaacattaagtgtacactaaaaaagtagaacaagatggtcataaatgatatgttacagtaattaagagcaaggataaaagatattcggttgtcatagtgacaattcaacaaaaaaaaaataatgttttttttatccgctctaattaatcttcgtttttgagaatgtgttgccccccatttttctacaacctgaaattgagcgtttttttttatttttttagtttttttctctttctttactttcctaatcagtcaataaattccttttatctttcatcccagaaattacgtattctctccctcttattcaaattcgcttttttttcatgtagatattttgatcgtcattccgttttctttttctgtcaatagatgagtaaaaaaaaaaactgagaaacacagatcagtttaaaggtcgctaagctttagataatccgcatctcagctcccaataagaggataaaaaattccttgaatcgcaccaatttcctatctgttttctcaacttctgtattccttcatagggttttttctataggtatctgtgaacttaactattttttttctttgtgttttgactatattctcaaggaagaaaccaggactttaatttagagattggtttgttcttaatccatttctcgctttcaaatgaatatgaaagtctgtaccttgacctgcttgacctactcctttggtttggtatcttcaaatggaacatagaggtatccggtttttgaggcacatcttgtcattttagtctattcaatcctttatatatgtatctgtgttcatatcctttctatgatgactcttactcttcttaaagaataaccatctaaactaacgctaatattaatcataataatgctgattgccgaataaacaagaaggtttatggtcagccctagacaataatgaggtatataaaacagttaacaaaaaaaaaagaaaagaaagcatttaggtccaaagagtttgagaaaatcacatttctaactgtctgaaagggaacaacgtcaacaaacaaagtaaataaacaaaaagagatgttctctctttctttgaggttttttgagagagaaaaatgaaaatattttttgaagttgccattaagtgcattgtttatcccaaacctctatatctcggaaaatctatgtttgaaaaaaaaaaaaggaaaacaaagcaataatgagaaaaagtaaataatactcgattaaatctggcatcgttattttatttttttgttttttttctgtttcctagtaaaaaaaaagaaaaagaaaacaatttactctttgtttattttttttttttttacacattttcgtttccgaacagaacacaatggaaaaagcacactgtattgtgaacgcattgttcaaccgataccctactcaaaaagctcatacattgtatattatgtatattttttccttttttgtttccttcacttcaaataaggtaataccctaaataaaaaggcaagccagaagaagaaaaagaaataacacaatgaaagatttcaaaagatcatttgcgtggatatttctaatgcattactcaattaggatatcatattactattaaatgttttcaagttacccttttttaacaaacttaaacattccaaaaaatttttcttttttgtttttattttttacgtaacttcctatttgtttcacttgaatagatcgatcgttcccttcttttttctttaagctcaattttgtttgtgtatttctacattagaaaaacccatctatgattggtttgtttgtttattacctgttttattaaactaattcaaaaaaagataataatgacataaaccgatgatgatttgttattcctctcactattgtgttcttgacttgtttctgtattttgtttactactttaggaaatataattttatccagattggtaaaattaattgaattaatagtggacaaaaaaataaataacaaaacaaaatatttgttatttatttttttctattcttcgtttcctttttcctgtcattcttcagattgtatattaccaaataatttacctttttaatccctatattggtgcttgaatcttgtagaatgaaatatatccctccgatgtttattcttattttgtatatttttttttgttttctgtttttgttttgtttgtattgtaatgtaatatttttttttgttttacattaacgataattgattaatgacaaatgatattcttaatccctcaaatgaataacaaaaacaggattttagtattgcttttgaatatgccattttttaattcttcaaatttatcatatctattaaggaagaaatatttaagattcactggggtggaaactgaattattttcaaatgagttttctttcctttcctccaaattttttttaaccttctttcccttctctctatatattttcttgtgttttctctatatttactcttctgtctcacacccccgtgtactacaaaatctccacaaaaagacatttcaacacaacagtcaagtcgaatacccaatttaataaaaactgttttgagtttttttttgcgtgtactctactgctaaaaatacacaacatattatttcgtaattaataattaatttctaattttaataattttttttcatatcttcgaactcattttcctttatatttgtgacactttaaaagtactattacatttttatattgtaccaattttttttagaatacacctattatagatccttattttaaatgtctgaatatattgaattaatcaagagaggtggtaacgaagccttaaaattgaatccaccacacgatgtcgacttccacatcactaagggtggttctgattggttgtttgctgcttgtgctatctttgctgctttggctttaactgctgttgttctaatgtttaccagacatgttcacgaaagaatggcttactacactgccattattccaaccttatgtatgtctattgcttatttcaccatgggttctaacttgggttacacttctactcaagccttatacaacagaaacagagtctctacccaaaagactcacttaggttttagacaagtcttctacgctagatacattggttggttcttagctttcccatggccatttgttcaagcttgtttgatgggtcacacctccgtctggcatattatgttcaacgttcttatggttgaaatctacgtcgtctcttacttagttgctggtttagttcactctcaatatagatggggttactacacaattggtagttgtgctggtatcattgcctgtatctctgtcttaactactactagacgtgtcgttaagagaaagggtggtgagctatacatggtcttcagagttttcactggtttatgtatcttcttctgggctatttacccattagtctggggtttatgtgaaggtggtaacgtcttagttccagatgctgaagctatctggtacggtgtcatggactgtttgttattaggtgttatgccatgtatctttgttgttatctccggttacttcggtttagacaccttaggttacaagtttgaagatgaagaatccactttgccaccaccaccaccaaagtctccatcaacttctccatcttccaagagtttaaagaagaagtcaaagaaataagcaactgaataattagttacctaattatttgtgtttattttttttttgctctttttttatcttgctcactaccttttaatgcatagttttttattttacaatgggttgttctaacgcttgcatttcctacataaagcaagtgttataatggccttttctcaaacatacccttaaaagatatataatatataatatctttgcaagtttttattatatttctacctggtacatgaattacgtggggaacttatgttcagatttttttttaatgacgtaatttttatgattatttgttattttatttcgtttgacaatcaattactatgcttttgcttttgtttttttttatctctgtttaatttcagaaaaaatttgcaattttcatgtcataccttttttttaaccctacaatattcatatatatctcatatactatatataccatgttagtaattacttaatactctataatagatagttttgctattgtgatattttctttctttctcccacaccgcattatcgaatgtagaccttacgaagagttattatgtgagcaagttatctaactctatttcagcaaagaaatattgtatatccatgcaaatattattgacacatatatgtatacatagatgtcaatctataaaagtttccacattaatcatattattgtttatatacttcaccatgttaaaacgtcttgatcagcaagtttataatcttcttcagtacccgaccagaccttttctaatctattcagattatgttcagttaatctcctagaggttccacggtttagtttgaaatacttcctcactaaatctcttgtatcttcatccattgcattcaaaccagctaacaacacagcaaaatttgaataacatgttcttgcattttgtggtgggttttcactatcaacaaagaaaaaaaatgacatgatccttttgacaacttgctgaatcgtaatggattctcttggtatacctaacagcttcagcaaaacaatcaagaggaatgataaagtttgagtctgatgtgagatatcataccaactaatagccacacgctctccattctttaatgttactatatcaatggcattatcactaatgtgactattatctggatgagattgactttccttagatatgatcccagtcttgctaataaactcatactctaactgtttatcaagttcaatcaatatcttttgtgttttaaaataagagatcggatcatcttctcttgttttatttggtgaccacaacaaataatcaatatttttattgaacatcccgccctcatcagcaatatctttcttttcatacattctaatagaattcaatgacctaatgacttctctaatgactaaatccaaatcttccttatgtccacgtaataaattgaactcgtttaatggtgtcataatattcaaaaatttcaaggaatcaacatactgaaaatcatatggatcaaaaatgtaattgatatcatcatctgtcaatgacccaccgaggactgtacttatactggcaaatgtctctatcactttaaaccaacatttagccacatttagtactttagaggagcttccagaattgattttcttgaataaatcagtcacacctttcaaatgagatctccactgagaattcatcgtatagatacaatcccatgctaataaaataacagttaaaataatgggttcaattttgttcaaaacatttgattcattgtgaaattgatcacccaaaagatttaaacaatgcgaaagatatgcacaataatttttttcatcttctaatttattagatttcctgtgtgctatggatgcccctatggctagaatagcagatagtaggtatgattcatttcgggcaaatgataataaaatatctcttaatggatttccttggtcttggaaaaatggggcaatggaatccaaacaatcattgtagaatattcgcaagtactcatcatggataccacctagcctgaaagatgatattttaatattaaattgaatgatattattaacaagaaatgaaatagggacagaacttatatttgtagggttgttgggtagtagctctggtatttctaaatcgggaaaatcataatttttcaaactttcgtttaacattactgaatcatttaatttcatactaacaatatcatttaaattttgcattaaaagattagcatcaacttcattcattttattagcagatattatgtttggtatatcgattactttatcggaagacattgaagaaatattgctaattggcctgctatcggtgagtagagacgctctctcactagcatcaattggtgtgcttgtattagaagttggtgtcattgattcttttttgttatcctttgatattttcccagctgagggcgagctttttgcagtggtttttctctttttatttttggcattcaaaatgtaaatacattcacggtttaatctagaacattgccaacatactggtttggtttcatcacatttcattctacgtcttttgcattcagtgcatccattccttgaatattttcttttgacaacagtagcctttttcccggtagcaacaggaattgttgtagctgttggagtttggttgagattggagttagacacgacacctactgcttgattctctacagagtgtatattgttttgtggaaggtcatggttcaaacttaatagttcaggactagacattactttagagctaaagatggagtttagagcttgatttggaccattcaacacagagggaacactttggaaattggtaaaatttttggaatcaagactattgtttgtgtaagatctttgactatccaacgaagctggtgacaagtaatttactggcagtggtaacgttgattgaatttccctatcatctgctagtgtcccagactttgtttcgtttccaaaagtagtatcgctattattattattgagataatctgcagacgtcatattaattagcgtgaagatgaaagataaaattgcaatggaaatattcagatcgaaatactaattgattcttagattaggttgagaggaaaaataaggatagaataatgaaaataaaaataacaaaaggtagtgaaaatagaaaacacaattccgtatagattgatggcagtttacacgatcaattatcaaagtatgacactttgctctctaaaggatttcctatattatcaaattgtctctttaaagaatactatggtggggaatacgttctagtcagttacgtgtttgaaaaatttccaatgacaaaattttttgttctcgattgggaatggaaaaaattttccagaggaatttttgtccaaaaagaaaaagtgaggaaatataattgtggtgaatggtaaacatccgtacatcacagcgtatgatataaaagatttgatatggttagattcattcacggattggatgattcatattgattgttgtgagagtagtgttaatacttcagtgggacccaaatactgagttttgcttcccttcgtgatttcaatccattcattaccatattttggttcataaagatttactttatgaaatatatctttacagtctaagcccagtttttgataagttcttaccaaccagacccaagtatctccataatttgggttgcttttaatggatctctgtaaccatttttcggcatatttatattggccatcattaaaaaatgagattgctatttgaagaagtaccaagtagtgatttttggttttagaaagtgcgtctttgaatactattttttttgttgatgatttacgatctgatagagatataagtttttctgtccagataattggacttgttggtagtaacttcaatgctctttcaatcagaagattaacttgatctaactgatgttgtcctttttctaatcttatcaatgattggtacaatctttcatcattaggagataaagccaatgcgacttccaaaatagagcgtgccttagaaacattattaagtaggttaatatgaactctagataatgatattgcaaatatgctgtttttaggaaacctcttaaatcctatgtcataccaaaatatactttgttcaccatcttttatctcaagttcataaatttgtccaatttgtaaataaaatttataaaattgaggatattctacaatacatttgttttggatatattctattgcatcatcatatttacccatatatctgagaaatgaaacatatttaacgtaaagtctctctttatctatagtgttctttttattaaagaaatcaaacataacattaaataactcttcaatttgtttgattctttttaattgacataatatttttaatttggcaaaccacacatctgatgaagtggggataatttttagtgctcgattaattgaatttagggccttatctggattggaactgtatttccatatatcttttgcatatagcaacgataatgttggtacttttcttaacgtagaataattagttttatcatcaaataaaattatttcataagttttatataattctgaaatttttgacatagtaacacaagtagtttgcaataattgccaaagactatattttgtgggtttgatgattaataattctcttaaacaaagtattttagtagtgctattttccatggtttccatagttttagttaattcttgtaacgtattagaatcgatggattggaatttaaagagactagagataaatagttcatgtgttaattttgaatcaatgtcgttttcgatatagagagctttttttattaattcaaaatagtcaaatttaatattaagtttaaccaatttcttaaatccattaataaatatatttgagcttttactgagtgatgaggaatgatactcttccaattgagctgtattgatccatgtatctatattatcaggcaagatattttgcattaattgtaatgtatctttagcattttcataatcttgcattttaattaaagctttccacagatcaatgttattaggtaaaaactctaaagctttcttcaaaatttttattgattctgttttttccttttcgtacaatacagccaatttccaaaatttttcaacagctggtagctcgactaaagcttttctaacaacccttaatttatttatgtcttctgattctaattctatagccttagtccaaagtttttgtgatgatggcacaaatttaatagctgtagcaactaaaattttgcacttgtgaatgtcatttctatgtaatctaatattttcaagccaaatatcatcacttctaggacattcttgacacccttcactaataatatttttagcagcctgaaatcgattacatttttcttctagccgcgctgatgcaatccaactttgtggttcttttggcattgaccttctataggattgaaagattatcctcatctttttgacttcttcagattgggatatattattcgacgtattattcatagactctaattgttgtagatattctttggtattatctaatttattagttgatgtttcgttgttttccaataaagtactgtctccatttaatgatttatttaaaaaacttttgtctatctttttactaagtaatttttccctttcctcagttaacgttgttaaatcaacacttctagttaatagggtatcaggtgctgaatacatctttctatttaattgttcctgtaatctattccttttatttcgtcttgttaaatcactagcttcaggaatatttaaccattcattttcagtaacttgtttaaggtttctttttaaatttgaaaattcttgaattgtaatttctctttttttcttcaaatcagttttatttctcccatttcttttagaatcaatattggagaatattctttctgcttctatgtcttctttatcttttagattaccattttcatttctaattgtatcagataattgaactgactgtaatcttttcggtatttgtttatttttacttcctctagtagaaaacccagttgcacctctacctaaacctgcaatataccctggaggtggtttttggtctaaaaatgcaggtctcttcatgttattgattgtgctttgtgaaataaacttgttcttaagtttaataaaggaattgcataaaattcaattatacaattttattttgaaaacttttagagttatttttgaaataggtcataataactatatagaatttcagttgttaataccattcaatgaagataacaaatgatattagtgtgtatattagtaacatataaagtatacacatagaaaaatctttttctgctcatctatatctttaattatatattgaattttgaagtacaatatttttttttgacgttgtgcggaatatatgcggaatacttcggtgaaatgtagggtcctataagagtttttcgataagattacattaaacagtgtgatctgttattattggtattctcttgcaagatagtattatatatttaatcaaaagtacacttcaagattatgttaatacttcccacagagggagaactattaatattatttaatagtaattagtttccacagatctaaatagaggactcttatcactattttagattatacttatttttgtcgtttaagttcatgaaaaggttttagttttggactgtacaaaaatgaattaaaaacattgtttagtgatatttaagtttggttaaggttgtatgttcaacaataaaaaaaatacttgtactataagctttgtaaatgaaaaattaatatatttttatattcttttcgattttaacagttaggtttaattcaacaaatataataattttacaaaattataggttacagtatattatccacaaagatgttacaagtacaatgttatatgaacaaaacaaaaatgctaataaaactttcaaaacaatttaatccattggcaatttttggtttacatatgcaagttttaattagataaatttagaaccatcgatttttttttggatatatattcctgatttcaatgcattatttactgttctaatacttatttttgaagtaacttcatatgataaggagagtcttttcaaatatttttggaagtggtataaattatgtgagcaataattttgaataaattcttaagttataaaacatttgtaatttatttactttaaatattatacctaaaacatcaaaaaaaaaagaggaaataggttttacttgccagacatcttttaatcaatagataataatgttaacaatatatctataactttactgtttaggtaggtatttgtaaaattatcttaaagttagatataaagtaactttggtaaccaaaaaaattgtatcgctagaaaagagaagaaagtattgttactattatgtgtagttataaatatgtcatatgcatgtttatttttttttctttataacttgaaaaaaaggtatatcttttcaccctaagttcgtaaaattgaaacagtgatgtattagtttgtatcgaatttcaagaaaaggatggagattgtccttaaatattcataaaattacttaatttacaaatatttagttaagttaggaacatttttataggaacctcattttactggatgcttgtgacattatgaattgagtttattagatccaatagtttataactggtgtccttgttttctttatttttaactaatacccagaaatataaatatagagagtatatgaataaatatatgtcttttttattttttaatttctttgtttttttaaaaatttcattcttaaataatatccctccataaatttcctctgcacattatccaaatactatttataatcttcttagcgtaataaagctttgaattaaaaaataacttcgttggaaatattatagttagaattatggttccagcagaacttcataataaacttagtataatagataaaaatggaatgaaataatatcaatattttaaagttaggtaaaaacggtggtagaatagaatgttccaatactggaaagattgatatggtttgtgaacaataggcagttctacaataagatgaaataacaagttataattatggctgacttttgtattattcaatggaagatgcgataaagtgaacagataatgaattgtggaaaaatatggttaatgctataagatccacgtaatttacatgcatcagcagtttatactgtgatatattgttaatttttttgtttttatagaaaaaaagagtgaatgtaacaaaatgattgagtcttatcattagaaaattttataaaaaactaacggcggtatatatttggctctggttttgtatttgcgttgtgcatttttaaatttatataaaacaaaaagaataatatgaagcaatacaataaggaaaagattattaatatcgttaagctaattgtagaaatatatattattggatgtatgtagccttgatagatgaactcattagatttatagtattatatttctcttcgttttctttcatcgtatatagtatatagatatagacatatatgctgtatataagtaaatgatcttcttatgttttaatcttttctcttttttgaaaacttgtccccttttttttgtatatccaaacactatatataatattgtagtcataataaaaactttgattaatcaaaaaactcctttaatatagagtaactatgacaataactctagcaaaatcatttactattattgtgtctcttaacattaaaggctaattgtttgtcactgccactggttgttcaaaatgtttcatgagattattttaaatttaacaagatattataatatattgatttaccatctgtgtcattcactaacatcaaattatacataaaatccctcaaatataaacgcatcacttcttgttttcccagttaattgaaacaataaatatagtactattttttctagaaaatgttgtggaatagaatagttataagcatcaagattacataagatcctgaatgaatctagaaccaattattgtattaataagctatacacatgctacaacattagatgctgcataataaagagattggattacataagattttggcaaatctagaatttacctattgttttaataagtcccacgtgtattactaatcaccataattagagaattggggtgcagttctaatccactagtgcacctaaattaatgtaataaattttagggtttgaatcagtcaagtcattaatgtactaatctgaataatcgatcgagctccagaaaacatataaaaggacaacgttttctggagataaaagatcatcttccataaccgtttcttgtaaataatttatatattatatatgaacaaaaatagaaaaaacaagcaagtaacaagttaagtagctttgaataaatatattagctcgatataagccgctcaatatataagaccttttagtaattatattatcacctataattgattactgtctcgattacttgaatgactattaatattatttgcgcttccctggaatacacaaagaatttcaccacctcataatacaacagaaaataatgagttaggccttgttggcgcaatcggtagcgcgtatgactcttaatcataaggttaggggttcgagccccctacagggctgatatttttttacttgatgtgaatatatactatttttatttttttttatagacgttcttgttttgttacatttaaaagatttatcttaatctatatatctgctggatctgttgttattctttcatagtttataatatatacagtgcgatgtatataaatacgtgtttttattaggagcgaaaaaaaatctcttatatataaatgaggtagaagaaggaataggaaacaaattcaagataagtggtatttaatgagaaaatgtgtttattttatttaaatacatatctatttttagtttcacacactaggaaggcaagattaagaatactcaattttttaaaaatgaaattgtataaaggtttttggatatatttatatatttatatatttattataaaaaaaatgatatatttgtaaaactttcgttttttgcataagaaaaaaaaacaaattttaattctttttcgtggcaatagaaagtaaaaaataaacagtttacattaaaatattttctgagataaaattttctagaaacaacaagaattcatccttgtaacaagatatttttacgatattaatacaactaataatcatgattaattaataaaagtattagtaggcatattattattaaaattcttttttcctttgtatatacagtagaaaaataaatatatataataataaaatataaaatataaatacatgaaatgcacagagaaaaaaaaaagtaggaaaaaaaaagatattcccctacctttttttctttgttctaatatgtgcagttttatttttacgataaagaaaatcattctcacttatcttttaacgactatttattttagcaatattaacagtattgagattttaggacaatgtttattcattcatctctaagtatcatttaaattattcaaatgtgtttgtttaatatttccaaccttcctaaaccccaatactcataatctattgcaatatttcaaaaattgttgcaattgtgtaaagataaaataatactgcttttctctgctttattaatatcaacaaaactaatacaccaaaaattttcattagtggttactatatgttgatgttgcaaactccaccctataaaaatccaaattgtttatatctcaagtaatactgttcgacataccttatatactatctaagaattaatattatttactgtaatacataataataatcttataggatatgaacttatactttgatgtagatgatataaacgacttaatattttctgcattacaataatttacaaaaaaaaaagaaaagaaaaaggaaactagagtaaatgatatacatgtgtatatagagatatatatatagcaattgtaataaaagtaatcacttcaatcaacatcaataaagataaaacagaaaaaaagaaaacaaaggagtataaagttgagctgttcaaagtggctctctgtaaaagaggatgttttcaaggaagagtaaagtgaaacgatcttcattctatacaaaagtatagctaaactatacatcgatatcactgttcttttttctttttttttctttattcctacctctatccaatgaatgttctctacatttctataatttttcgtcttgcaccttttctcctcctcttcttcgaagaaaacaatcacacaccaaacaagagcatcgtcacagaaaccaaacgatttgatgactcataattcttttttcctttttttttcttttttcttttttcttttttctttgttcttatttctttttttacctttggcgccagttgtgtctctttgactcagaatagccagtccgcgtcccccgcgccagcccctcttcctctgactaagttgaattccactagacagaagggaaaaccaaccaagatttttctttgaagattttagacagtttgatctgcacagcaaaaaaagaagtccggtaacggattaaaccttgttacacgaaggtaaaggattcctttaacaatccagcctttttacccaatatatatatatatatatatatatatgcttatatatgtatggtatgatcactcagacatgtttttttaatacaccatctttgaatttaaacatcccattttaacgcgttaccacctctctagttctctttcttcttctatttttcttgtctttttttttttcttcactttcttcactaatgttaccatcacacataagcccagcctagctaaacaatacaagtcgagtattttctctttgctttggcttgtctatctatttcatctcgttctatacataacaattgtactactacaactatcacagcgactacaactgcttttaataaaagtatctgtcattaactatgtttatcaaaaacgaacacgcaggtgatagaaagagattggaagactggaggatcaaaggttatgaccccttgaccccaccagatcttttacaacacgaattcccaatctccaaacaaggtgaaaagaatattttagaagctagagaaggcgtctgcagcattttaaatggtaaagacgatcgtttgatcatcgttattggtccatgttccatccatgatccaaaggctgcctacgaatattgtgataaattacaaaaagtgtctcagagattgtcaaaggatcttttgatcatcatgagagcatatttggaaaaaccaagaactactgtcggttggaaaggtttgattaatgatccagacatcaacaattctttccaaatcaacaaagggttacggatatcaagagaaatgttcacaaaacttgtggagaaattacctattgccggtgaaatgttagacaccatctctccacagtttttaagtgactgtttctctctaggtgccatcggtgccaggactactgagtcccagttacacagagaattggcctctggtctttccttccctattggtttcaagaatggaacggatggtgggttccaagttgcaatcgatgcaatgagagctgcccagcacgaacattacttcttatctgttactaaacctggtgttacagccattgtaggtactgaaggtaacgaagacacctttattattctaagaggtggtaagaccggtactaattttgattcccaatctgttcagtctgcaaaagaacaactaataaaggcaaaacttttagacactgaaggtaagaaaagaagaatcatgattgattgttcccacggtaacagtagtaaagattttagaaatcaaccaaaagtagctaaagttatctatgaccaattagtagctggtgaaaacggcttatgtggtgttatgattgaatccaatttggtagaaggtagacaagatatcccaccagaaggtggccgtgctggtcttaaatatggctgctctatcaccgatgcttgtattggttgggatactaccgaagaagtattggaattattagctgaaggtgtaagaaagagaagagaagctttacaaaaataaaaagtaaaaaacaaaaaataatttaaaagagggtttttagtagaagaatatgttttattttgtttttttttccctcttcttctcgcctcttctctttcatgtcttatttaaatctgcatatatacacatgtgttaaaaataacaacaatatttatttatttatttattcaatatatatcccccattagttatattttaagtcagttttattttcgactacttatttacttgccaaagaaaatatatgaaaaaatatataaacaaacaataactaattataataaaaaaggaatgctccaataaataagtactcatacctacaaaacattttcttcatgtacttctattacgagttattaatataaagtattatttatttacaaggtgaatatataaataatcattacctgttaaagcccaattttagatcaatttctgaattttcttcttatcacattttgacacaataatttgatacctaatttatccttagtaaatctattatagttaagaaaatagtttatagtatcctgttccaaattattagactcttttagattcttctcaatatattcttcaataaacttttcagtaggtaattgatactttaaatgatatggataattcttccaagtaacatttatgttattagaccaaaggttcaacggaattgatggtttggttgagaagaatgaattcaattgaagtttagtcaatggattagtttgtttccatggatatggtgtcttggctttatccaacaatttatattttgtcgcatttgaaaattctgagacaccggattgatcataacacatgttaccagccacatataaatctcttctcaaagctgattcaatatgatctttagaattttcttgaatcaatttaatagcaatatccattgatgttaacgatttctttcttagttttgcctcgacttcagtggcaaatcttctagactcgattgaaccattttcaaaagtttttaagttatgaaaaatgttttcaacacttgttatattatcgatattaaaacattgttcaatgacatctagttgatcatcattaaatttaaatttataaccatcaggaaaacgattttcagagtactcttctatagtattattgatcatattataaatcatttcattatgatctttagaataaccgtcatcaacattcttacctctttgaaagacatcaatttcacctaatctattctccaatttagttaaattatcatgcgaaacgtaatgagaagctaacccaagaatataggcatcttcaccaccaataacatcaccagtaagacataagtataaagccatttgacaattagaatttgctagagttataactcttggtaaggcaaatgaggttccaacatctggaaaaaatccaatatccatttctggcatggcccattttgtgtattcactggatattctaaatggagaatggattgaaataccaacacccccacccatggtaataccatccatgatggacacaattggtttattgaaggtagctaaaagataatttaatgaatattcagcagtaaatacatctgtactatctttaaatttaccaaccaaattattttgtgctacttgtgccacatctccacctgcacacaaagccctcggaaaattagaagatttaactataatcaagttaatcaaatctgattttgaatattcattcaaagtatcaaacattgatttacacatcggtgtattcaaagcatttaatttctccggtctatttaaaacaactaaacgtgctgtatccttcacttggtaaattactaaaggttcatttgctgtcttcatgttaatgtttgtggctgtagacatactaacctgtttttttagaggttgcgaaatggatgatctataatgtggtaattttctaattgttgatctccacatactcagttcttaatactttggataatatactccatatatataaatatttatatctatatatatatatacacctatttgtgtttcttgtaaatttatttttgcgtatcccttaacaaactctacctaatatacctctcaaaaagggaatctttaaaaatgtcaaagacctgtaaacacgtcacacactggtcggttgtgcaaaaagcttctccaacagaattacaactgtgaaatagacaatcttaacattataatcgttggaaaaccgatagagaattcttccatatcttaaacaaaactttcagggattattcgttttttcattctaaaaaaaataaaagaaagtaaaaaaatataacagaaaaaagaaaaatagttattttttgctactcaacgtctctcctctattcttcccaccaatgttatattaggattcataataaggttaacacaagatatagattcgacaattaaagtagtaattaatgacaattatagataacaagcaacaagattgactatcgttaaaagattcttaaatgtaatttatattctttatacattaaaaaagaattgaaaagaaaatttatcaatgaaatgaaacaaaaaatgcattatatccttttatcacttctcaacatcgagaaaagcttgtgtttcttcttttgatctctttggatctcattattaaatctttccagatcgagcaatgatcgctgctgatcaaatgacttcttcatctctgtaatggactcctcgtccgatgttctatgtctatctttgtattgttttctatcctctgaggctccatcttgtaatgccctggattcaatagctaacctctgcaatttcatgtctaaggatttccttttaacactttccaaatcaaattcaatgctctctgtggtaggtggattaatcaatttcttattttcagttgaatttgcttcatccttttctaactttctattttgagttgctgaatcttgatactcatgtggattattttccaaatatggtgatgataaagttgatgttgtagctgataaatcaattagagaattgtctaatgatttcttcactggacgtggtggtacctctggtaatgatttagtatcttcatccaatatacctacatctttattgggattttgattatattgctccttgtacggatgtggtggtacaggtggtggtgatgagaatgataaagctgaagaaactgaagttattgatgatgctggagagaaagaatttttgtattgtttcgctatgtcttgttcattatgtggtgctaacgcagattgcatatctattgcctgttgtgcattattcaccatggtaaggtatttattttgatgtatgggttgaataggagtaactactggcatctgtgaattaattaatacttgttgttgttgttgttgctgctgctgctgctgcaattgcaattgtggttgcggctgccgatactgataaagaacttgctgtgcactgcttccatctacaacatcataattcattttagggaatggattatttgatttatgctgttttaatgtagcggtattagattgtggagcagaagatggagaggtagtagtaggtggattaatatattctacactgacatactgttgttgacccacctcctcagatttatgctgctgctgctgcaattgttgttttattttgtcttcatgttttttatcaatataatcattaagttcatccacagaaggaaaatacctttcacctatatcggtctcttggttattcattttttgtaattcttccaatcctttctctgcagtgttattgtatattggactattgatggttctagtattcatatcttttaattcagattctttcactgttgttgttactgtttcatttggttgttcaagattctcttcatattccactggattagctttcacatttgtaaaatctgtcgttgtctttatagcagaggctctttgtggcacgggaattgatggtaacacattgaaagaattaacatataattgattcaggatatagttatcctcttcagataataccccactttgttgtctcaatttattttgtaaattaaaaatttgtaattgaagattctgtgaatttttttgaaaccacatatattgatcataactatatgatccaataccatatttatcaggtataggaaccggacattgaagaatttcgcatagctgatacattacttgatagatgttaggtcttaaatttggattttccgataacataatgataatcaaattaatcaattttgatgaatatttattatttggaaattcaaattttgaatgtaagattgcaaactgtccagttctttcaaatggagtaataaaaaacaacaatttgtaaaggaagacacctaatgcccaaatatccgatttttcatcaattggaagacatttatataaatcaatcatctctggagacctatattgaggtgttgtgtggacatagatatcatgagataaaatggctatatcgtggtgtgttgtcactacggggaaagtagttgaggtagaaccaaaatcacataatttaaaattattttgtttatcaaccaaaacattttctattttaatatctctatggattaaaggtatatctaaataatgcatctgtgatattgctaaagttgtatcatacataatcttcaaaatttccttttctgacaattttgttgccaaccgttgattcatataatccaataaagatttattgggacataattccatcaataaaagaatttcaaacccatttggtgaatattttgtatatctttgtgcatttgaatcaaataattgaataatatttggtttatattttagctgttgcatgacatttacttcatttcttagttcatttaaaccattgttgtcttgtactataaccctttttaaacatgccaattcacctggctgaagaaaagtgtctttatataaatctttgttctcgatagtgttaccatcctcaacggtattttccttatttttactattattttccatcaaattgacattaatcaaatcaataaattttactttataaatttgggaaaatccaccttctgctatataatcaacaatttccacctgatgtttccccactgaaacaatagtaccatttgagagtttttcaacctgaggacttgttatggttggattaccacttattaatgacattatggaaaaagtataatacagttattgattattattgaatattatacttatcctctataaaagaaaaaaaatacccttttggttagtatatgttgagtatatcttcgataatgaaaaaaaaaaaattcaaatcaaatcaaaaagtagaaaatcaaactatcctccctctttctcctttagacactttttttttatttttccttctcttatttgattttcactaaatgttaatactgttaactttttaattgtattatatgagatttaatatattactatatatttcacaattgtgaataaatgactttttattatatcatttaaaactctattaaatgcttttcatattctctttgtcattttattatagttataaacgcaggtaaaatgaaaaaaaaaattcggaatcaaaatagttgaaataaacatttaaatgaacaaaaaacgcctccgacggtgctcgaacacctacctgcctggcttaacactaatggctacaaattacgtgtgtccgaatcttctaagttgctataattttgactcctcatcaaaaagcttcttcaacaaaaggtctcatccgtttaaactttcttttttatttctttactagaaaccatctccaatataaaacgtattcaacatgaggaaagacatttgattcctaaccacctttgacaaatagaaattgtttatataaaatttctttgtatctttttcgtcttttctttcttttagatgtctcacatcggatgttgaattacttcttccatataatgggaaaaaaaaattacactacatttcttgaaaaagatacacacatagtcttaaatgaaatgcaagggaataaaatgagacatatatgtttttggtcatttcatccgcactttatgaaaatttctaggaaaactataataaaccacaacatacatacgtgtgtaactgtaataacgatttaacattctaaaatttttaccaaatatatattacattgatacagccaagatgttgatatttaaatccaacacttaacttttccaacagtaatgttagaatttttacaagacgatttaaatattatcgttttatatatctttatattgtggttcatgtttaatgttcaaatacgcaactgataattaaacatgttaaatataatttatttacgataatttattgtatatttatttggaaaacacaaaaaaaccccttattcacttgaaaggtaaaaatagatatattgttaatagttcggataaagtttaccagtgtttagtattcaatctgatatttaataacctttaaaaaggtattacatgtacacacactcatatgatgtgaaaatattttgttacatttcttaaactatatagcaccagttttcttttttttttttttttttgacatataaataagttatttggaagcactcattacactcattagtaagaccaaaaaaaatgaatatcttgtaaaatattgaactattattactactttgtaagtgatattaaaaggcgcttattatttccagatttattattccagcatcgcattcttttggtgacaataacaaggaaaacacaattttcatgtgtacaagagaattagggttccaagaaatttgttctggtaaacaaattttttactggggggatatcatcaaatcgccgaattataaaagaagggtttgaacaaaaaaaatgaatgtgttttctggaaatatttctttttttattttcattttctgctttttctttttttcagatttttaaactttactttttttcctttatgatcttggtttcgtgcaaagtgaacaatatgaaaaaaatttttttctttttccttttgtcatttcttttttttttttaatttttttttatgtgctgaaaaaatcctcgaagacaaagtgaaaaaattctgcgatgaatccaatggaaaaaaaaaaacattgaaaacattaaactatcatcattcttgatgattatatctcatatatataaacctttacctcattgccctcttagctccaaacttaatattataacatgtgttggagattaattattttctccggtgcttctttttcttttttttttttgtttctgtttttcatttgggttaacagacctggattcctcttccatcttttctttcttgatatatatatatatttcctttttgatttattcttgtgcattcttcgagtctaggaagaagtaaaaaaacaaaaagataaaccaaaaagaggtcttacaacctttgttctacttcattaaaccattccccactatcaaacataacaatcatgtctcaagaagaagttgcatcagctacccagtccgtagctaacttgcatttagatgaagtcaccggtgaaatggtttctaaatctgaattgaagaaacgtatcaaattaagacagattgaagccaaaaaagctgcaaagaaggccactacccaaccaaaacctgctccaaagaagaagaagaacgatttgttcgctgatttagatccatcccaatattttgaagccagatctagacaaatcttagagttaaaaaagacccatcaaccaaacccatatccacacaaatttaatgtttccatctccaatccagacttcttgaagaaatattcctatttgaaaaggggtgaaaccttaccagacgaaaaagtttctatcgctggtagaatccacgcaaagagagaatctggttctaaattgaagttctatgttttacatggtgatggtgttgaagttcaagttatgtctcaattacaagattatgcaaaccaggatcaatatgaacaagaccatgacttgattaaacgtggtgatatcgtcggtgtagaaggttacgttggtagaactcaaccaaaaaaaggtggtgaaggtgagatctctgtctttgttactcgtatccaattgttgactccatgcttacatatgctaccagctgaccattttggtttcaaggaccaagaaacccgttacagaaagagatacttagatttgattatgaacaaagatgcaagaggcagattcattacccgttccaaaatcatccgttacattagaaagttcttggatgacagagatttcattgaagttgaaactccaatgatgaatgttattgctggtggtgccaccgctaaaccattcatcacccaccataatgatctagatatggatatgtatatgagaattgctccagaattattcttaaaggaattagttgttggtggtatggatcgtgtttatgaaattggtagacaattcagaaatgaaggtatcgatatgacccataatcctgaatttactacctgtgaattctatcaagcttatgcagatgtttatgatttaatggatatgaccgaattgttattctccgaaatggttaaagaaatcactggtagttatgtcgttaaatatcacccagatcctcatgatccaactaaggaattagaattaaactttgcaagaccatggaagagaatcaacatgattgaagaattagaaaaggtctttgatgtcaaattcccacctggtgatcaattacacaccaaagaaactggtgaattcttaaaatctctattaattaaacataaattagactgtccaccacctctaactaatgctcgtatgttagacaaattggtcggtgaactagaagactcctgtattaacccaacatttatctttggtcatccacaaatgatgtctccattagccaagtactctcgtgacatgccaggtttatgtgaacgttttgaagtttttgttgctactaaagaaatttgtaacgcttacactgaattaaacgatccatttgatcaaagagctcgtttcgaagaacaagccaaccaaaagagtcaaggtgatgatgaagctcaattaattgatgaaaccttctgtaatgccttagaatatggtttaccaccaactggtggttggggttgtggtattgatagattagccatgttcttgaccgactctaacaccattagagaagtcttattattcccaactttgaagccagatatcttaagagacgaagctgaaaagaaggctgaagccaaatgaactaccattatatctcttaattagtaaatggtttttgcaactttataacacttttattttttttccttgtatttcattatctttttaatttagatataaaattgtagatatataactataaataggtatataagtatataatgtaatttttagaagtaagttataataacaacagtaataacaacaattagatacatttatgacaaaaaaattgataacaacttgatgtctgaaatatattgttaaagtatggaggagaacaaattaagtacttcaattaatatattattggatattgttattattattattttatagttatatatatatatactattgtacagtggttgttattagaccattatgatattcctatagaaaaattgtaaaatcgataatagctgcttcttattttattctttttcaaatttctataatagttttaatatgaatttaatgaatattagttataaatgccgctgatttttttaacattttggttgaataataacagttgtttctaaagtagtggaactactgtatgcatggaatggatctctacgaacactcttttccaaatcatgttctggattttctgcttttgatttatttttgaaatataatcttttaccccatttgtaaaattcacagaaaatccagaagaccacagtaaatgcgatggcaacaccccattcataaccgatacctttatgcaaaaacaccttatcattaataactgggatataaactacagggaatgctgatgcaaaaccgaaaacaatagaccaaaataaaaatttgtttcccaaaatatctctaaaaaattgtctaactggttcatctgtttctggttgcatacggaaaaaggatctacgtaaatcaacaacctcccaagcaaggatcaatgcacaccaagtcattgttgcaaaggcaccagaacgagctctaaaaacataacggcatgattcattgtatgacttgttacattgatagcccaatttaccaccatcgtgaccataaataattgtggtgaaagtccccatacagacaccagccatgaaaataccgtaactaaacatatctataataatttcccatgtgaaaatgccatcctttgaactgtttggtggtctttccattagatccggtgctgctttttctaaacccaatcccatggcagggaaacatgaagtcaccacaatgacccatagcacttcaactggtgacagtggaaacacagattttccttcttcatcctggaaagctaacccaactattaaatatagggcctgtgctacattttcagctaacaattgtagcacaaacttttgaatattatcactcattcttctaccttcttcgacagcattcaaaatagaagcgaaattatcatcactcaagacgatatctgatgcatccttagcaacatctgaaccattaatacccattgcaataccgacattagccaattttaaagatggagaatcattaacaccatcaccagtcattgcacagaatttactccttctgtgtaaagcttctatcattctaaccttagtctgtggagaacaacgagcaatgactaatggcaatacaggcatagaatcgatttcctcatcactcaacccatcaaattgtgaaccagtcatgaccattacatcaagaacttcctctggatagtggtataagttgacaggcaagataccgacttcttgagcgatagcttttgcagtaccggggaagtcaccagttaacatatgaacattaataccagcttggtgaaacattttcacggcgcctgcagtttcaggtcttggtgggtcatagataccaatcaatccaatgaaagtcaatccattttcaacagctggacgatcagttaataaagaatgcttctcatcttcagtcacattgtctttattgaatgattttgtggcaaacacaagaactcttaaaccttcttgagataatgtgtcgatattcttagagatgaattttttgtcagtatctgtcaattgtagtagatcatcacaggaatcaccgtaccagtacttacaacaaccaataacactttcaaaagccccctttgtgtagactacaatatcgtttgtctcatatgattcatatacggcagacattctcttaatagtggaatcaaatgggaattcagcaagatgtttaaatggaaattttttattataagcctcatcattcttttcttggacattttcttcctggagatggtgggttccatcagaaaccttttcaccagtcaattttcttcttggtaaatctaatttagtggcaaagacctgaatagcaatctcagtaggatccccatgagctatccattctccagtttcatgatctttaaagacgttagcaatattagccaaagtagccgcatggacccattttgtaaacagtctattatcaatatcactaggcaattgattattatagtatttatttttaaagtctgttaagataccgacatcctgtgaatcatcatttttgaattcttgtggagagattcttggtatgaaatttatatcaccgacggttggattaaatggttcctttgaattttccaccataactgtgccgaatccggggacccatacacgtttagtaatcattttaccttgagttaaagtacccgtcttatctgagcaaatatcattaactgcacccaatgcttctaaagaatccaattttctgataataacatgccttgaagccatgacagcagcaccaacagacatagtgattgttaaaacgacaaccaatgaggaaggaatcatagacaaagcgacacagatagcataaatggcaataccccgatcaaccttaaacttctgtgatgccataaccacaattgcaaagattacagcgacaccaaacaataaaatggctaatttagataatttacgatgtaaaggtgtgccaacagtggtacccaagaaagcaccagaagtttgtttcaaagagatccaaccattcaaccaccaagtcttcgatgggtccttggagattaagctttcttcaccttttaaagatttggcaatcttaccaatctcagtgttcaaaccggtacgaataacaatcccatgagcacggcctttaaccacgatagatgaagcgtaagccaaattcaatctatcaccaacagaggtatatttatccttttcataaactatgttagagtctttgctaacaggtaaggactcaccggtcaataaggcctcatcagtctcaaaattgtgagtattaaataaccttaaatctgcaggcacagtgtcacctaccttaacagtgactatgtcaccagggaccacatctttggaaggaacaattgtagatttcccattatctctaataacatgggcgttaggagaacttaattgtttcaaagaattcatagtctttgaggctttatattcctggaaaatacctataatgacgttgattgcaataacgaaagtgataactccacctgtgatccagtcatgtattgcaaaggaaataatcattgagatgaccaaaaccaggatcatggcattacatatttggtgaatcaccatagctgtgtagtcaatctttgtatcatcaccaagagaattatcaccgaagtgatgtagtctttctctaaccacatcttctttcaaacctttatgagcatctgtacctaaaaaactggctgtttcatcgaccgataaagtatggaaatcattgaagtttgcatcaaaagtgttcataccacactcaataatatatattttctatttatatttgttttctgttaaattaataaactttgatttgtttcctgtagtagtcgtagtcgtagtagtagcagtagcaataatagtagttttaagataaacttaagtagttagctatatatattgtgaaataaataagttaagacttgtgatattttcacgttatacgatagaaataaaacacttatgtttgtgtatatgtatatatatgtatatgtatatatgtatataaccagacttacccgatctaaacaaacagacgaataagaacaaatctagaacaattcaaagaggagaacaagaaagattagtcagcagaagaaaaggggaagtagtaaagggtgaagaataaactcaaaactccgaacaaactcagaaatcgatgggccttatatatacttctcttgtgcaatatttgacaccaagacactaactaaacattgataaagtaaagggtgacgtcatccccttcaaaatcttgcgataaagaaaattattaattcagtcaacaagaagaataaatgaaaaaacaaaaaaaaaaacaataaaacaaagcaaaaaagtggctttaattcaaggatttgggatactgcatcacttattgacgcctgctcgatctcttgctattttttattttttattttcttttttctttttttcagccttaatgtggagtctaatatccaaatacaataaaaatacacactgggttattgtaaaatatcacaatagaaattaataaatcatcaacatgatgctattgttttgagggtttgtgtgcgtatgtgtctgacggtaagttttagccgtaaatgcggagaaatagggtttgtttttgttttgtatattaatttttattgtttgtattgttgatacatctagccgttctggaatcacgtgggccgttcgaatttgtttatttgcttattttcttttttttttgttattttttattttgtaggatgtcttagagattgttttgtcggaataaatggaaaaagaaaaaaaaaaaataaataaaaagaggagaaaatctttagttattgttttctggctgacccgtgtctactgcttaggtttttattgcagggggggggggaagagtaaaaacccttgctctctcttttcttcttcccaagaaaatttactctacttttatgactgtttcctcagttcgatcctggcaagtttcattttttaaaaacaggacattttattttttttttttgtaatgaaaaatcctcaataatgaaaagatttgaaaatattactacaaaaaggattaatgataagggaaccataaagaacaacatagatacaccaatacataaatatacttatacctccagctctacataacaagtcaaactaattttctttttgtttatttaatttattttcttttttcgtgtgtctcttactcttcattattattattattcacatatgttaaaattcaaaattccctcatactatgcttcctcctattcgctattcttcagacctttgatacggtatcaatccaacttagctaaagatgtttccacaggcaacagcactgctcctataaccacttcaaacctcactagtatagcatcagcccctaaattatctatcaattcgtcagatgtgtcagcccatgaagatttaccaatcaatctaaaagctctttattttcctccaataaaactgcccgtcaaatacggtcacttgaaattagatatccaacttcgctcgtatgaagtcagttccttggaattctttgcagacttcattcaaagagtcgctttctatttaggcatcccaatgactggtcccaaacctttaccgaagagacacgaaacatggaccgtgattaggtcccctttcgttcatgccaaatcaaaggaaaatttcgaaagattcacatataagaggttattgagatgttgggatacaaacgatgcagttttggaacttctgttggcttatatctctaaatattcaatcgctggcgtcggtgtaaaatgtaatttattcaaaaaagaaccaatcaccattaaaaattgggatgaagatcatgtgctggaagaattagatactattcaagtcaatcttcagaccaacgccgaaactggcgtcgaattacaagggaatcaatctaacagcgtggttgattcaaagatattagaattattaaattcctccaaaatcgaataaagattgaagacaaataaaacaaacaagaaaagacaaacaatctatgtagagcaacatatagataaatttttaccccacctgtatatatgtatatatttcatcaacaaaagagagaaaagaaaagatcatgatattcacttaacaaggaaaacgagatacattctcatccaagattcgtataaatagattggatcaactactggaattctggatcagggttaaaaagctatgtcaaagttaataaaatttccacctgttaaattgtttggattcggttgaagaaattcaagttgttgttgttagattttatcatcattcaaaattccaaaattaatccaatgaatttatagaaaatatgaaaatgtacacacacaatttttatcagttaaccttcttatggtacaaatgtctacgcagaaggacaccgtgttagcaaaaaaactactcttacttaaaactccatggatgaaacgaaaaaagtagtcaccctatgaaagttaagcatcgcgacagagcggaaagaaaaattgaggaaatctaccagttccttcttaatctctgcctctctctatatatatatgcttatttatttcgtcttctttcttttcgctttgatgaaaataagaaaagaaaaaaaaaatattttcgtcacaaaggagataattttatttttcgtgttttttttttatttttttttctttagggcataagtgtttttgtaaaatttaccataaacaatattatctactactattataaatatctgtgtctgcaaatgtagtgtgcacataatattgttttatatattaggtggatgatccaagcgaactttgattaacaaaaagaacattttattttgtattgtacttctatcttggaaagcaaaattaaagattgctcttaagattggtgaagtaattttactatattgtactactctgtctgtattatcaaatatcgtttcccaatggcaagctctcttatctgtaatgtataacaaaatgtcataagataagaacaaaaatgattgatttatcttacaagtttacatgtattatttgtttttttttttgaatacgtacggtgtgagacttcacaaaaataacagaaaaatgaaatataaaaagaaaatatttgtctaatgatggtatatcaatgtttaacatctctctatatttaaagaaactgttcatatatcacagaaaggtgataatgtaatcaatatgacaaattaatgttagttggtgatatcaaaaaagtatacactatattgaaaaaaaaaacaaaaacaaaaaaaaggtttagtttctcagtaaatctagatgtacatattatatacacttaataaaagtcataaaatacaagtaacatttattaataggctcacgcctacccatgatggaattatcgacatctccttaaatgtttacatcgtgttttcaaaaaaaaaatttttttgagttgtttattgcagaccgtggtgatagaaaaactagtaacaagaatgtttgttgtgatgaagtcacatgattctatatatttggacagataaaataataccaaaaaaaaatctagtcatccaaataaccagaacactctgatgatggaggaatataaaagaataatgtgttgattaagccatatagttatattttcatgagagagaaattcaactctttttttatcaaataaacattaaatacagatagtattagtgcattaccaaacctggggcatctattaatactactttatttaatctaggggaaatatttatcccatttatgatcaataaagtaaaaaattattgttaaatgatctttcgtaatgaataagtacctactggtgacatattaatgtgcattttacctctgtaaaaaacagtaaaacacaagagaattaatgactgtaaaaatgaagcatgtaatataaacgattagccaaaataaaaatcaaaaaaggcttataatgtaaaatacacaaataaggaacaagtgacacatgattagatagaaagtaactgattgataaagtttagaaaatcactgtaaagcatatattaaatccgttcaattgaatattaaactattcattctgcataataatttatgttgaaaccttattacttgtcttttcatttactttggatctatactttcctatatgtattactagtaagaaatacttgtatgtagatcctttttttctttttaattccctttgattaaaacattatagtaaatgaatctccctcaatctgcgaatagttgatgattattctatggggaaaatacctatattactaatgtacgtaggattaaaaaaaaatcagaaatcaaactaagatgaatctattcaccacaattgtacagcactaaaaacatcaaacataaattccaaaagcgttttataagatatacatagtatacgtgattctattcacatatctacgcgaacaccattctatattatacatacacgtatattcatatgcatttacacggtaaccagtgggaaattacagaatgtccacaaaaattttttagttatcatcaataacaacccgcaaaataaagtaacaagaaacgactaataatcttatagagaagagatattcttgttaaataaacaattgttgtaatgaactttagcaaatctcaacaaaatcttcactaattcctatcatttcatgtgtatttttcgctctcttgttaaactactcgattaattaactgtttatctacctttcattctattgttatagttttgaacgaaatgcattttctcgtttaattttaatttatccaagaacgaaaaatattttgtttgaagtacggggaaaaagaaaagaaactatggaagtcgcttgtgttcgaggaaaccacaggccgttaaaaataaaaaaatgagaaagaaagaaataaaaagggtttattagtgttatatatggaggcggataccttattttgtacaatagagattgtcattttttcactatatggtaatattatgtgttttgataaacgttaaatgcaaatgtcagatataatagccaagataaaattgtattattacaatggttgtaattgttaactaagagttgaatccatatgacaataagatgctaatttaagcaatttcaagaatacactctttgatattttattttaaacgagaataagaaattcttgtattgtaaacacttcggtaaacaaatactactaaaaaaatgtctttgtactttttttttttctctctcttctctctctccttacctcttgttttcagaattgaaaagatagggttttcaaaacgttaaagaaaaactacaccattaacagcacaacaatccttatggtttctctcatattatatctagatttgagacgaattatccaagaaaactcgtctcaccgtcaactttaaataacacattatatagggttagatttttttttctatctttaacaacaagtttacaccgttaaaggaattgaaaacatgctgtttccacacagccctctattttgactttacatacttttttttatttttttttctttcatccccccctttcccaattctttgtctctattttcttctgcgagatctcttaaggcaatattcaactataatcttgtctttttttttttttaacgtttggtattcatcaaaaaccaagaataagtaggaaacaataacgaaaaaaaaaaacaaggtcgacaaacacaaagatgataaacaaaagtaagaaaaaaaagaacaaaactaactgtgtcgaattaatattaagtaaatttttgggtgattatatctgttacctatataagcgttaggtttggggaactttcccatttcttgtctaaccccttttttctacccaaatttatcattaactgttaacacacaacttttttgcgtgtgcgttgcatttgataagtctatattgttcttacttttcacctaatttatagtctctctcgaaaggaagtaaaccaatcgtcaaatctcaattgcatatcactatcatgcctgctccaactgattccacacatgcttccatcagggagaagatggaagctttaatccgtcgtaaacaaaaggaaattactgaaggtttagaatctgtcgatactgttaaattccatgctgatacatgggaacgtggtaatgacggtggtggtggtacctctatggttatttccaacggttccaccttcgagaaaggtggtgtcaacgtctctgttgtctatggtaatttaaccccaactgctatcttagctatgaagaatgatcatgctgacttgaaattgccaattgatccagagactggtttacctgtagctgaaggtgtcaaattttttgcatgtggtttaagtatggttatccatccaaaaaatccacattgtccaactacccatttgaactatagatattttgaaacttggaatccagatggaaccccacaaagttggtggtttggtggtggtgccgatttgactccattctatttatatgaagaagatgctgtcctattccacactttacacaagaaagcacttgataagtatgaccctgctttatatccaagattcaagaagtgggcagatgaatattacttgatcaaacaccgtaatgaaactcgtggtattggtggtactttcttcgatgactacaatgaaaaggatcctgaagaaatcttgaagattgttgaagacagctttgacgctttcttgccatcctatttgacaattgtcaaaagaagaaaagacatgccattcactgaggaagaaaagaaatggcaattgattagacgtggtagatacgttgaatacaatttaatctatgatagaggtactcaatttggtttaagaaccccaggttctagagttgaatctatcttgatgagtttgccagaatacgcttcctgggtttatgaccatcatcctgcaccaggttctagagaagctaaattgttggaagttactgctcatccaagagaatgggctgaatgaggtaacaaccttttataatcttcgttcctttttttattttgtttaatgataatgacaactaatatctgatctttacctattattatttatttatatatttatatgtttatttttttattcatggttataagtattcacataaataattatttatgaactgatcttctttgaataaaatgaaagaaatactcaatttaaaatatattctcttgtttcgttcaaccttctttgtgtatatacgttaaatacttagtatagaggatgcaatgacttcttgtagttgaagcttttttcaaggaacaaaataacccaacataagaagaaatacaaatcaagtagttgcgtatccttatatgcaatgaattaccaactagccaagatgttacctcattttttcgcattataattggtatttgtctttatttctaatacttcgataatctaggttaattaatcttacagaaaaaagcattattctacacaatcttagcttgttcatttacttcttggatatttttttttacaaaaatcccatagtaaaaaatttgtaacatgggataaattagttgactcgttcctagactcttgctttattgacttctcccgtctccgatcttttatttttaatcctctgttttcttttttttttttctgtttctttttttggcctatgtttttctctttttcccctgtcagttgatttccctttgcggacattgatgaataagaataagctgtggaaatttatttgaagattcatcctcgaagaaaaaggaaaaaattaagcagcttctcgagaagtcattatttcacctactcagtcactcaggcgaatattttagtttgcccataaatatttaagtaacaggtctattttgagaacatgcaccagtaaacggtagttgttccctactttcccctcggtgtttattttgatcttccaaacttgcttgcgtttgtgaattgttttgctcttctttggccatagttagcttaaagatagcccttatttttcttttctctgtgttctcacatcccctatcaatataaaacatacatcttcttttactgtgtaaaacttgtttatacaggtatacccactcattacaatatattcaaagcagcaattaagaattttagccatgtctaacgaagttaaaactgctattctctctgtctatgataaaaccggcttattggacttagctaggggtttaactgaatgtaacgttcgtattttagcttctggtggtacagcaaacatgatccgtgaagctggtttccctgttgaagatgtttctactattacacatgccccagagatgttgggtggtagagttaagacattacatccagctgtccatggtggtattttagctagagatatcccatctgatctcaaagacctggaagagcaagatattaagatgatcgactttgtggtctgtaacttatatccattcaaggaaaccgttgccaagattggtatcactgttccagaagccgttgaagaaattgatatcggtggtgtcactttattgagagccgccgctaagaaccatgctagagtcactatattgtctgacccaaatgattactctaaattcttaaatgaattaaaggaaaagggtgagatatctactgaatctagaaacacttttgccttaaaagcttttgaacatactgctagctacgatgctgctatctctgatttctttagaaaacaatattctgagggtaaagaaatgttaccattacgttatggtgccaatccacatcaaaaacctgctcaagcttttgtcaccgaacaagaacaattgccatttaaagtcttaagtggttctccaggttatattaacctattggacgctttaaactcttggccattagttaaagagttatctgcttctttgaacttaccagctgccgcctcttttaaacatgtttctccagctggtgttgctgtaggtattccattaactgatgtcgagaaacaagtatattttgttaacgatattgaaaatatgtccccattagctgctgcttacgctagagccagaggtgctgatagaatgtcatcatttggtgattggatcgccttatctaatattgttgatgttccaactgccaaaatcatttctaaggaggtttctgatggtatcattgctccaggttatgaaccagaagctcttgaaatcttaaaaaagaaaaaaggtggtaaatattgtgttttacaaattgatccaaactatacaccagataacattgaatctagacaagtttttggtgtcacattacaacaaaagagaaacgatgctattatcaaccaagcatcattcagagacattatatcacagaataaaaatttaactgaacaagctacaattgatttaactgttgctacaatcgctttgaaatatacacaatctaattctgtttgctatgcaaagaacggtatggttattgggttaggtgctggccaacaatcaagaatccactgtacaagattagctggtgataaagccgacaattggtggttcagacaacacccaagagtcctagctttcaaatgggctaaaggtgtcaagagaccggaaaaatctaatgctattgatttatatgtaactggtcaaattccaactgaagaaccagaaaagtctgaatatgaatccaaattcgctgaagttccaactccattaactgctgcagaaaaaaaggaatggttatctaagttgactaacgtctctttatcatcagatgcatttttcccattcccagataatgtttatagagctgtaagatctggagttaagtatatcgctgctccatctggttctgtgatggacaaagctgttttagctgctgctgatgccaataatctagtttatgttgaaaatgctttccgtttattccatcattgaataatttcatagacgtttttatttccttcctttcttcttttccatgtttttcaacgcattattaagtaataatctcatttattaaatatagataatgtaaatctatcaatgcagatattcgttatgtatttatataatttaagataaatagatgttaaagtataatagatggtgatggtgatatcaaacagaaaaatgattaaggtaaacgcaatacagtgtatttctgtatcggcattgatattctaatttattgtatttcaactttactgtaaccagaaacactttgtcgacaatatacacatctttcataacctcttaacgccaaggaaacccgacaattctcgcataatgcaaaacatctacacggccataaaattatacacctttcattagttttgcaaacagcacatggtaaatctaaagtcttattatgaaacatatgtgaattaccatctgtaagatttccaatgctaaaaatagaattgtttcgtgctttcatatattgagatctagtcattctttgatcttccattaaatgggctccaataataggagtcacttcccttaaccaatattgttctttatcctcctcttcttgtctaccgtctttcatagcacctatatcagcagtcaacattaaattcagcagatccatgtcatcttctacttgatcatcgaaattattgtgttctattatttcatcctcttgatcagataatacttcttctaatacataatcatcatcttcttcctcaacatatactgcacactcttcattaagagaagcgactaattgattcccatgctcatttaagccagtgttatattctagaacggtgttgctaaatctttctggttggttggaacccaattcttcatcgtcttgtctattagaaaatctagaaatggtatatctccatattattttacatatattccaacttaatgggagtgtgaaaaaatgatactgattaaagttgtgatgaccggttccactagtgtcattgatacatctgttccacaaactaatggatatattagaatcgatttcagctttcgaattggtcgatgaagacattttaatattgtctggaattagtttattatctgttctaatgacaatatgtggtaattctctatggtaataacgcaactgagtattctttcttgaatatattaactgaacaaattttttaatcattaatgaataatcttcttccccagttagattaagttgactccaccaatttttcataaacgaataatattgcaaatcagagatacgaacgtctctaggatttctagggtcccatcttactaatactgctaataaaaagcatgaaagagataacacagtcactaaagtacaaaatatttttgggaaatttctgtattgaataataaatgggatattttcaataccgtataaaaagcatagtgtagtaatgtatgacatattgataaattcaccaacgcatgtaatatgcaaacggtatttcttgatattgaaaagctccaccatatgaataattagtaaattaatcaaggccatactagaatctggaataaaataccatttgaatcttgctaactgttccttaactgaaaaagacggatttagaagccttctttccaaaaaataatattgtacagttaattcaaacaacgaatattcagaactttctaacggtaatctatggtttactatactaatagtggtagaaaatgtatagcctattacaaaagccatatatcttttaaaaagacattttattagatcattttcaaaaaatgggagacatagggcatatattaatatgaaaatattactcagttgaatagcacgttgtgttctagtagataactttattaggtgttttcttcttgaattcctcaatcttgtgttatatagtggtgatctagatataataaattcattcaatattaatgctgttaataagcatattatggcgtatttactgaaaacaaaagtcaatgcaatatcaaaaagtttattgtgttgccgatatgcttcttctctttgttccttaactgcacatattatagatctaatgaattgataaggataattaatcaaagatgaatatctccatgaaggatcaataataaaatgatccgtttgatctaaatacgaatgtataatacgcattccttccagagttattctagtcatttcttgttatttacatggtatggttttgaaaggtttaaggcaaaacattaacacttagtttcgttaacatcaattggaaaaaatttgtatgtatatatgttaaggaagaagtttatctgaatatacctttttttttctcttcctttcccttcctaagatgaaaatgttgaaattactttagataaacttattaatgtaagtacatacgaaaaaagtacaggcttacttgctgagggaaatgataacacagcagtgcagcaaattagtcttatggatatggttatattgatactgatttcaacttaacatgaatgttcaaggggaaagaagaaagacgaatgtttcacttattgttatattgttttattgcaatatactttatactgtctattttacaagatatttcttaaaaaaagataaagaagtttataagtggtttatttgtgttgttgctactaatgaaatatttcaatttataagccaacacatcatcaactagttttgtgaggttactgtaaagtttgctgttattcaacaatatagtccatggctatatttttattatagaaaatttatatatataatattaacaattatgtaacaaatttatcttggtttttctgtcttaacattaaactagatagctcctaaaatttattattaacggttattacagtgttaaaagaaggtcttgaataccgttcatgaccaataatgaaatagaagataatttttttcaatccagatcaccagaaataattaattgtcaaatacactaggtcttttctagttacaaatctcacagcaaagttgttatcagttgatttcaaaaaataataagtacatatattctatttctttctctttcttctaaaacatttttttagtcctttttacaataccctgttaaaatattattatatcacgcaagtttatatgccataaagaaattcttcttggataacaacatgttgcaaaaaaaaactgaataaaataaactaaaaaagcacattaaattctataaatgttatattaagagacatcgcaattacacaaaacaatgttgtaacagatgaagatttattacgagagaaatactcttctagaggacaaaattagataaatgattcctggttgttttctattttcaatacgtaaactacactgtctgcaaggagcaagtcaacatatacagatacacagacacataaaacatttataaacaagtgtaatatccctgatattattgtttagggttttgtttagaaaaatgagggttgacgatatttttctaaactttcctttttacaaaattttacaaacatacatgaaagcaggagtaaccaacataagtacaagagagcaaccaagaagaaggaacaaggaaccaaggactacctaggtttagatatagtacataagtgtataactattaggctatctgagattagggatatagatatatagacatataggaatattacatctagagatatagaaagagtctatatcttatatctatccaagtgaaatattattgagatttcaacaagaattactgttaccagaaacacataacctcagggttattacaacaagaaaaaaaaggtataaaacgcagtggatcgactcatgattcagtaatatcgtctacagtgatataaaaataatatatgtcacagatgtgtcgtaaaaaataaatggttgctaagagattcgaactcttgcatctttcgatacctgagtgttcccattattttaatggttaagaacctggagattcttgaatcaggcgccttagaccgctcggccaaacaaccagctgctcttgtttcttgttgtagatcaaccttgatattatgattgtaaaaaacgattagggttgaaaaatattgttagggttttgtgatgattgtcaagaaaagttctagtttggaattataggacttagggtttgttgataaatcccacatgattgttgaatactatgtaacaaaatgaaacattcatgaaacattaaatagctaattaaggagaaatgtatctacggtgacagtcgttacagaacctcaaataagaaactatcaacccatagttcatatataaaggaccagtatcttggtatctaaatttatatgtttggttgatttataaatatgtagcacattgtataatacaaaaaagaacaagcaataatcgtttaattttcctagatatatataacgttcttatatatttgttattgcccttactattcgttcaatagtactgttaagaaaattggtcctaagtccaaactataacatttcttgtcgtaatataaagaggtaacattaccgagattacgtaagattttatctgaatctaaagtgatctattgtgttttaagtataatgtgtccatttgccacctagtgtacagcgtgttcacatatcttcgttactgcgccaccatagcctattgtcctaaatgttctatgatcttcgattatattattgtaactaataataagatatggattactaattcattaatatatcaagtggaatagttgatcaaattccagaaaacatataaaaggacaactttttctgtagatggaactatcttctgtcactcctctcttacacataatttatatatattatatatagaacaaaaaaaaaacaacaagcaaccaacgaacaacattgaacgcagaatacaataagcaaatagtataattatataagctcgatatagtcgttaatatataagaccgtattaataattgcattaccgattgtattaattattgtctcgattattaatagattattcgtttgatatttctggcgcttccctgaataatacaaaactctgaccacatcatatcacaatacttctctttttattcaatgtactttatgaagtaagtatttaatctaatatttttataacattttaaaaagctataaaataaattaataaatgttgaatatgaataaagtacatctattttaacttataaaataagaatattcaaaaaataatacagaataaataatattgtccttttataaataataaacagtgataaattattataaataatatcccaaaaaaaggaaacaactgggatctattatattacaaaatatatcttattcaaagaaatcattgtagatacataagggcaatcattttttctataactttttatatgatttagttaatattgaatacgtgtatataaatggcaaaaacactttttgaaaaactttgataaaatgaaaaagtttggagaaagtattttagataatgttgtttttagcagatataaacattaataaaagtagaattattttttagaattgggaataagtcaaaccaactttaataaattattcagattaacatattttacctgttagaaagacagttctttgaattttttttttaattccattatttatcttttctttttcaagttattgatataagaaaggatttctaaatttttactttctaataaattgcattattatctagaatttgttgaaaaaaaaagtaatatttcttcttttaagttgatactgactaataaaacttttgtttgatcatatttaaaatttagtaaagtttaaatttttaattatatatatcctacttactatttgtccacaaaaaaagaagcatcaaaaacttctgaatttgacctatatcaggtgctagttaatagatttattattagaagatacacttgattatactccagggaagcttatacaagatacttttgaatctatcacctactaaaatttgttattttttacattctacatcttactagatgataaatatcctatttaattataaattttaattatacctgaaagataggattggtttgtggtgaaaaataagtaacaagttgataaggatagtataataatatggaagtattcgttaagtcgaactattcaaggtgtaaaagtgatggtaaattaaacttagaatggagatttcagcttacatttataatttttatataataaagttgtcaaaaaagtgaaaatattatgaataactgttttaaggtatttgatattgttaattataaaaaaaatatgttacttggttatcttagccagtttttaaacacatcagttcaaaggccaatgaatttcattcactagatacatatagttgtagtaagacaattccatacaaaaagacggattacagaaaagtgaaaaatgacaataaaaaataccaaaatagctgtaatcatgttaatttgcttttattggtgttttatgaaaatatatattggcatttgaaaaatagatgtgtaatatcttaaactaattggttataaattttacaaattttttacctaatatttaattttatttttataacaattctttttagaaatagacaatttaaagctctaaaattatattttatttttgtttggagtttattttttgatgaagtggtaccttaactctaacttaatttacatacatatgttttttcttttgttgtttatgagcatctaatttcaatgaatgtgtgataagttcattgattctagtatttttgaaaaaaaaaaacaaaaaaatataaaaatagaaataaaaatcttcaatgacacatatgttttaagaagctataggtaactaaaacgaaacaagaactacattgctaactaccatatacttcaacttactattatgtcaaataattcttctacaaatgcagtccacaacaatagtagtttatcggatttaattgagttgattaaaactacaagacaagggtttattattcaggaagatttggatgctataacatcaattaataacaacatcaaacaaattaaacaacttactgttacctttttgcaatctaaaacaaaagaaataaatgtattgcgtggaaaagttgataagaataacgagaggaataactctatatctgcggatttagatttgtccaggaatgaagcaaagaaatatgctaatgaaaatgaaatattaagagagtatactcataaactaaatgatactaaaaataaacaagaagaactaaagaaaaaaattgatatggtaactgatgaattggcaactttacagacaaatcgaacaattgatcaaaatatgtccaatagtcaacttaataagggtaatgaaagcatctatgactatgaatatttgaagaaaggtaaagaaattacatcatttgatgatataacggttgacgaagaggatgatttagaatcggattattctgatgatgaaaaggatcctgattattataaattggaaattttcaaatcaatggacattgtagtagatcctgaaacaagtgaagtctttatatctcgacaagatggtaaggttgatgtactatctttagaagaaagtagaaatgattttttcaataacaaattcgtgtgggaaagattaagcaaagaatgattagaagttattatcaaagattgtatatgatacattttatttgttgtagatcatggatccttatgttttgtttgttacttgttcatacttattattaataataattggtgtatcttaacatatgacatggtacaacgagataacctccattaatatgtttctatttgtggtgtattgatgtatgtacagtcctgtaattttttaaaatttttagaaaggactccacgtttcgcctcttaattatgtaaattcggtgaaaccaatggcacgtttgtcgcaaaaaaaaaaattatgaaagagaggtagcgacgcaaagaaatttttgagtttcgacgtcataagaaattttttttattaatgtatctgaagaatataaaaaaagaaagtttatctactttatgatctgtcctggctctttcgtaggtgtttctttttatcgttaatcaatttcaattgactgaaagtaagcaacagcaacacgaaaaaaatggctactaacgaagttttagttttaagaggtaccttagaaggtcacaacggttgggtcacttccttggccacttctgccggtcaaccaaacttattagtttcggcttctcgtgataaaaccttaatttcttggaaattaactggtgatgaccaaaagtttggtgtcccagttagatctttcaagggtcactctcacatcgtccaagatgttactttaactccagatggtgcttatgctttatctgcttcttgggatagaactttaagattatgggatgttgctactggtgaaaccttccaaagattcgttggccacaagggtgatgtcatgtctgtcgccatcgacagaaaggcttccatgatcatctctggttccagagacaagtccattaaggtctggactattaagggtcaatgtttagccaccttattaggtcacaacgactgggtttctcaagttagagttgctccaactgacaaagaagacgatgacactgtcactgttatctctgctggtaatgacaagatggttaaggtatgttaataattcttttattttactatttcatgatgatatacttctattttattgattccatgaatgtggtattattttttaagtttacacagcaattaatgattgcaaatgatgtatgaatatatttgctacttcagaggaggctatttgtttccaatgagatatttcaattatcaccaagatctctgatgcgtcatttatatgtgtaagcttgcgaatttgttacattcatggtacttcgatagatatgaaggataccgataataggaaactattcaagatattgttactaacaaattactattattttacattatttaatgtcgatttttttgttttaattaggcctggaacttaaaccaattccaaattgaagctgacttcattggtcacaacggtaatgtcaacactgttactgcttctccagatggtactttgattgcctctgctggtaaggacggtgaaatcatgttatggaacttagctaacaagtcttctatgtacaccttaaacgctcaagacgaagttttcgctttagctttctctccaaacagatactggttagctgctgctactgcttctggtattaagatcttctccttagacccacaagctttaattgatgacttaagaccagaattcgctggttacaccaaggctaacgacccacacgctatctctttagcttggtctgctgatggtcaaaacttatttgctggttacactgacaatgttatcagagtctggcaagttatgaccgctaactaagttaattaattaatattaactttgtgtttttattttttaatttccgtttaggtattgtggtcttcatataacttacatcatataatataacttattatattatgttttaatcaataatatcattcttaactttgcttaatctgcagcatactgtataatattcaaactatataatgatactaaacgataatcaatatgataatgtttaaaatataaacaaattgtagttgatagctattttgacaatagtttaatggcggtttattatcgtttttttagaaaaatattatatttagtatcttgtatgaaatgctgtcactaccctctgctaaaaaaacgagagtagtatgtaagtttaattatacttgcacctttttgtatattgtaaaacctaactaattgttttttgcggctcactaatatgttgttgctcaagtcttagtgtttggacctgttctaattctttgcttgcttcattgactaattctttgaaatcttcttctttggctaatgttattgcatctttaagtaaacgttctgcttgtgctagtaatccatcattaagaactaatacaccttttccgtatgtagatagggcaatggcttgtaggattgaggtgtctaattgatcttttatatgataacgtaatcttttatttttattaaaaaaattaagtatagaatcataacatctttctgtcattttcaaacagtttcgcttattcttatttaatgttcttagagccttaattattgtatcatcctttaataaatctggattttcctgtatttttgaattaatttgttcaatatcagcatctagtttttccatttgtaagtagaataatgatcctaaattggcttgtgccaataagatttggccaggtggcatatcagccattaccatccattccacagttgtcattttgcaggttaatgcagaagcaatatctttacttgaaaggcaatacgctgtatataaatcccttgcaacaaataattcttctttgaagggttcccaagcacttgaattcttattcatatctagaatcataagtccgttatcctctttgtctaatttaatattttcttcattgacaaatacttgaaagtcatctacagttagagactggccctttagtaatttgctggttctctctctttttctgtcaaaaaattccttcaactctggagatttcaacaaaatctcttcttgaactaataacagatgagctaatagattttttttaccaaattggatatcctgattcaattctaatgattttattagaattcgtaagtctttacggattaattctgccctttcattaacactgattttagtagaaatatcacttctatcacttaatgcaagatagaaacggttcaaaatttcattatatacatctttacttctatcaaacatatttaagcgttctaacatttctgcaatctttaattcaattctggtataggcatcagataatttacttatgtggtttggcatttcattcaaagccatagcatagtatttcaatgcctctgaataattgtaatttcctttattactttccatccaaactgcttcttttagatatttggatacttcaggattatatttataatctttcaaaatacctgtcttgtcttcattaaatgtatcaaaataaaaaccagaaccaatcgtgagtaacgcagccattcctataatcaaataccatttagagggatctttttttgatggattggaaaaatgttgaagtagttggtttggaggttttgatatttgttgaaaagaattccattgttgtgaatgggtagagaaatgttttattttggtatttattgagggaataagattgttattaataatgagtcgtctaccttgtaataatagtcttctgtgggctataatcatttttttcttaattgtcaaaaaattatttttttttcgttttcacagtttaggtttcctttcgaattgagctacaatgatctaattgacagatgggatatctttcctgtcttttaatatgtttatctatattaggtgaaaggtttgagggtgttcagatattatttttttaaatttaataatcatcaactcacaccaaattttaaaagaagattaagactcggaagaaaagcgaaaaaaacattaaaaaaaaggaagaccctaacaaaataataacctacaagaaaaatttaaggaaaaataaagatttgacctacttttgccgtttttatagaaatctttgaattcttgaaatgcttagaaagatttccatagagaacagtctttagaatatttatactacattctcaattttggactatctaaatgactaaaagtagaaattaggactcaacaaatagagtagggtagaatatattcaaataagattcttttcgagatctccaaatcactttgttatttttatcattataatactcctttttcttcctttttgaattactatgtgtggaagatacgcattagtatatgatggagatgaattggcaagatatatgtcaaatcagttaaatcaggtagtcagtccatctaaagatagttatgaaaggtcatataatgtagccccaacaaagcatatgcctgtttatttttcttttagtgcacatttggataaaggtgataaccctaaagaatcaaaccaatcggcagataatattaataataaggataagtgtcatataggtattatgagatggggatttatcccatattgggcaacagatgaaaatcaatttaaggggtatgccacaattaatgccagattagagtcattgaagacgaacaagttgtatggacaatcattatcaacaaaacgatgtgttgtacccatcagtggttattatgaatggagaaacacaaatccaaagattaataaaagaaatggtaaaattccatattatgtgactagaagaaatagtgatgaattgatgtaccttgccgcggtatatgattataataaaaccctggatctatatacatttagtattattactggacaagcaccaaagaatttagaatggcttcattcaaggatgccatgtgtgttagagccaaaaacaaaagcatggaatatatggctagagaattcagaaaacattgatttgaatcaagaagaattggcaaaactgttgagaccatcctttgatgaagattattatatatgttatgaagttagtaaagacgttggaaaagtatctaataacagatcttatttggtagaaccagtacatttatcaagtaatatagtaaagaaagaaaataaaatagattcttatattgcaaaccaaaagaaagatgaaaaaattgtttttccatcaagcaaagaggaaaatgatgaatgtaatatattaaaaagggaggaagatgtaaaagattcaacaaaattagaagatataacaagttctattatcgtcaaggaagaagaagaggaggacaagaaagataactctaatatgccttttaaaagaaaacggaaacttaatgttatcgaattattacacaggggaaaaaagaaaaaagtttgataattgatcatatttaaataacattgatattttgatgacaaaatcaccagtgtttgaaagagaaaacgatattgtagagtcaggaagaggaatatgtactgaaaatgaaggggagggggacatttctatatttctttatttacgctgtattctaataacattaatatattctaagtactatttttatatattcaagtttttagattaaaaatatattgattggatcatttatttgcatctttaactacatatatatacatatgtgtgtgtatgtgtgtatacgtttatattggctaatgtgtattgctatgttttcatgttttgatagattttacctttctctaatgtgtgaaaattgaaaatatttcattagtcaaataaagatatatttaaaagagaatactgtgaagaagtacgtagtctttgatcaattttgaagaaagaaatttacacatacatgcatatgtatgtatatgtttgcgtatgtgtgaagaattgatggatatttaatctggatggcccaatgcaatctccatacgtacaagaaagactacaagctttagaaattgtggatttgaaactttgttctatccttcaagaagcatcacaagtggtatccacatacagtaagattaagaaaggaaatcaacaattaagacctcaatttgctagacatgtcacacagttgtataatgatctaggatacgtatcaaaagagttaagacaagagattaaatatttgaatgaaaatgttgggaaaagactgctgcctattaataatgtaaataaaagagctatacaccaagatgatgataaactaaaagaacagataaaaattttagatcagttacttaaagctcattcagatgaaaatccaagtaattgagtctttcggatgttttttttaatttataatggtgtaggtaagtattctattatatatgttattttatttaattttgtatagttttggtgtatatttagttgcaggttccacaagtaaatttcaatttattaaattggtaggtaaagaattgctgaattttgtgtttgtccttaaagaagattgaatctgaatcactagattaagcttctttgtagtacaatactggtttttcaggagaaggaggtatgatgaaaaatttaaacaaaaggaatgaattttttaaggatagttggtctcagcctctatacatatcgacagatatataaaaaaactgagttgtatatccataagtatacatagaaatagatatatattatcaagatattcccttaaataaacagattattgaagttgaagacacttttttgctcatttgattattaaatataatagtaattttctaaagagaattgaaaagaaatttctgtaataatatttaaattaataatactattatgtctacacccttaacctttactccaattgcagatatcccatctattgtggctaaaggaaagcaattctatagagatagacaattaaatttgtcacatgaaagaaatgcaaggaaaatcgatttggaatttagaattagacagttacagaaattgtattactctataaaagaccatcaagatgatattatcaatgctatgctcatggatttccatcgagctccacaagagactatagctttggaattgaccccattgttaaatgatgtcttacttattatcaaacaattacctaaatggattaaaccttctaaagtgaaagacaggtctgcaccatatatgtttggtagtattcaggtagaaaaaattgcaagaggattggctttagttatttcaccattcaacttcccattattgttggctttgacaccagtagctaatgctattgctggggggaactcagttattattaaacccagcgaaatgactccacaggttgcccaattgatggaaactattgttagggatgcagattttccagatggactagtcagttttgttcaggggtctattccagagactactaagttattagaagataaaaatatagatatgatcttttatacaggttcccctaaggttgggtctatcatagccactgctgcaggtaagcatttgattccatgtgtcttagaattaggtggtaaatcacctgtatttataaccagaaatttccaaatgtcgaacttgaaagtggctttaagaagattgttttttggtgggttcagtaactctggtcagatatgtgtaagaccagattatatattgattcatgaagcacactatgatgcatttgttaaagaatctaaaaaaatcttaaatgaattatttcctaaattaaataaagacactgaatttacacatatgatttctgaagttgcatatgagagaatctctcaaaagttgaatgatacaaagggtcaatcatatgtgccagaatcatatttaagtgaacaaaagaaaagtgaagtagataatggaaataatttatttctaccaccaacattaatttatggcgtagattgggatgatccgataatgaaagaagagaattttgctccagtgattccaattgtaaagtataatgatttagatgaagttattgacaaagttattcaatatcatgatacaccattagttcaatatattttttccagctcacaggctgatatagatcatatcttatcacgtattagatccggtgattgtgtaattaatgacactatcatccatgtaggaattcaagaagcaccatttggtggaattggttactcagggtatggtaattacggaggtcaacacgggtttgatgctttcactcacgaaagaactatctttaaacaaccattttggatggattttgctttatctatgagatatttcccatactctaataagaaatctaaattgattcaaatggctaatgaacagcaaccttcatttgatagaaatggtagaagaaaatttgatttagctgaaaagcttcgttatttaatgggtgtattgactggtttagctggttattatttttataaaaaattatttgagcaaagatgatttcaattatttgattgtcaaaggggaaagcgtctagttgataacagttagtgttttgtatgttttatttttattatgtcctgttgatttatatttacttgtaaatatatcatcatatgtattctaaattacaaattatttttaaatcttttcgtattttctttaatgatacataagaatcttatacaaatagaatcatagtgattgatttactaattataaaataggaaaaatagatatttatacttcatgataaatagtatatatatatacgtgatggaggaatagtacgtggattgtttattgttaattataatatacataggaatggttagaacaattaaaacaaaaataaataataaaataaatatgacaatttctctatgttaattaatgcttaccattagtacgtttgtgacgtaattcgttttgttctctttccatctctgggtcaaaactaatgaattcatctaatcccttacctgctgggaccattggtaaaacaggaaccttcttttctacttcgacttctaataagactgggccttcagtgttaacgaattcttttaaagctttatctaattgcttttgttcggtgacctttatacttttgaaacccatggcttcagctaatttttggaaatctgggtttaactgatgagtgtgagagtaacgatgctcatagaataatgactgccattgagtaaccataccttgttcttcattgtttaataataagacttttattggtgcaccagcttggactgcagaacttaattcggttagagtcatgttgaaggaggcatcaccatcgatatcaataaccaaagcatctggcttagcaacttgagcaccaatagccgatggaacaccatagcccatggtacctaacccaccagaagtgatgaaggttcttggttttctccatgtccaatgctgagcagtccacatctgatgttgaccgacaccggtggtgacgatgacttctttacctgtagagttagcaatcttggatagtttggcaataacagtttgtggtttaattttggaacctggagtctctttcatatagtcatatggatatttgttcttccattcttcgatttgtttaaaccactcagatctgtgcttgacagggaaaattcttggtaataacgcctccaagttgctaccagcatcaccttccacagctacttgggcttcaacaactttgttgatattttttggagagatttcgaaatggataataccacctctattttctagggctgctcttcttgcttcaggagcaaatttggagatattacaagtgacacggtcatcaaatcttgccccgatagcaataatcaaatcaccgttttgaacagcgatgtttgcaacagcagaaccatgcatacctaacatatctagagactttggatcttcttggtcaaatgcaccaagaccttgtaatgaggtagtgacagggatttgagctctgtcacttaattcctttaataatcttgggccatctggattatttaggataccaccaccgacataaagaacaggcttcttagccatgttgatcaagtcagcggatttatttagagcgtcttccaaaaattcgtcatggacattaattttgtttgtattcaatggtggtaaagtactagctgttgggatggcctctcttaggattgcggcggtgacatcctttggcaaatcgactaagacagggcctggtctaccagacatggcgatttcgaaggcttcattgattctagttggtaattcggcgacatttttaaccatgacgttccatttagtacaagatctagagatacctacaacatcggcttcttggaaagcatcagtaccaatggcagaagttggtacttgaccggtaaagacgaccattggaataccatccgcaagggcatcagccattggagtgacgacattagtggcaccggggccagaagtgactaagacgacaccaggtttcccagatgcacgagcataaccttcagccatatgaccagcaccttgttcatgttttggcaaaacaaatttaaaattttcactattgaagatagcatcatagacgggtaaaatggcaccaccagggtaaccaaagatggtatcaacgttatgtcttgccatcatttcattaaatatttgaccaccggttaaaccaacaaaagagttgtctaaatgttgattttggcgtaatttttctgcaatcttactcttagtgaaatcttttgtattagaggaataggaagtagtagtgttagttgcggtagcagtagctggatcaacattaaaacttggggcaggttcaggtctagcagaaaattgattatttaaaactttagtgttagaagagtagttacgtaataaagtactggagctgaacgctatgacattattatttaaagttttagatgtgatggattgtaaataacgtttacttagtacacttttgcaaacagattgtctcaacattttgatatttagtttttggttaatttctttttcaattcactcggttttgtaaatatatgtaataatgtatgtttattttatccgacaatttttgttattaaaaatataatgccctgtaatgcaggataataatagtagtcgtgatataatggtagtaattaaagatcaaatatggttagatgatatgaataaggaaaagaaaaaataaaaaaaagaatcagaaatagatatgtgtgtatatgtatttcctgtgaggattgattagtcaataaaaagtgacaggataatatagtatgcaatgagatttggaataaattctttattttatttatttcagtcacaggcacagttgtatatatgtatgtagatgggatgggaggatagatctatgcagataaggctaggtatgctaaagcaaacaatgaaaataaatatgaaagtgaggaaaaaaaaaaagaaaagcaattagttttggaaaactggcaaaaaaatttcaacgatcgtaagcaaactttccaatacgaacaagaagaatagggttcatactattgtacaagaaaaaaaaaagagagagaaaaagaaggatcaagcatgtcaatattacattatatatatatacaggcaggctgattatttatttgtaagtataatacacgaggagatgcaacggaaatgagtaaagttatatgaataaatgaatcatcgttttttgtcttttttttttcttttttttttctatttcttttcttatttttttctattttttgtcatcttgtcatatttactatagtgtataattgaggaggaggaagaggagaataaaaagatatagaacaggagaaaagcgatgagaagccagataactcagtgtaatcccgtcaaggttagatgctagttgataatcaccacgctactgtaccaaactaaatcaaatctggtcaagtagatgttataaaatctctaacacaccttctcgtgtccctgggctcctctttcttccctcgccccacatgtacgtatgtatggtaatcttctcaaatctttgtgactcaaacagcagaatcaaacaacaaaaaggaagaagaagagagaaaagaagttaaaaaaaaaaaaaaaataaagtcgaaacaaaagtgtcgctattcaattaccggttctattttttcttttgttttgttcggttttcctttctgatcgattcctccttttcttttttccccggactaaagacaggaaattatatttcttttcttccattttgtccggtaacggaatgatcaaagaaatcaaaaaaaaaaaaaagaacaagaataagaaacaaagcgtgagatgaaatatgaaaaggcggaactacttttgtttttatttatttcttttttttttcctttttttttttcaagaaagggatggagatgagttgaatagactaggctcattgtatttcaactacccagagaaaaactcttatattaatctatgttagtgatatgtcaatgttattgtgttgttgacagtttatgacatatttgtttcttgttttgttttgtacatttttgtttttgttagtcgtggtcgactcattttttggtttttttaacagtccgtattgtttttgcttgttgatcttccaattgttaccactgttatgaaccaccgtagttattcttgagaggaaagaaaggtaaagcctctaaagttgcatatatattatcggaaagtagacttgtgagtagtttttaaggggaaaaaataatacgtgtaggataataataataataataaataaagaagaaaaacagaatcttaatataatgtaatataacgatatatatttgaaagatatttatttatattatatatgtgcttttttacttcttaaatttgagtactgtggtttttttttgtttcaatcatttgtatttatttatataattcaattttttttttgattttgattttaattttgttttcgttttttttttttcttggttttaaaaattaacattgttattcggtccacctttctttaaagtattataaatactctgaaactctccttgtgacatgtcagatatctgtttttttgttatttcatctaacccctctaaggggtttcttattgaaaaacttttatttgtgatacttccaaatttttcagtcatggtatctgtattattaattttatttccattatcttcagtcatatttggagaagataaagttgttgttgtcgttgttggtgttgaatcactggatgacacagaagattttctttttggtatctgagtcacattagactcatcgactgtagaaggacttgttttcactcctgtatcgtacacttctcttgcatacaaatattgggtattatttgatcctatattggtgttggttcctccatatagggtcggatcgtcatgtttatgtctattgtaaacttgaaatgaatcccagaatttaaccattttctttttctttatgttttttcttttttttttttttttcaattatgaagaaggacagtaaataaaaactgacagatagacagtatattatcagcaaaaaataaaaatgacatataaagtttaaaattatatatatatatatatatgtatatgtatatgtatattaatgtatattgatatgtttgtaccaataatgtttaaatttaagggttttgtctaatctttctgaaagattcttgagttttttgttgaaattattaatgctatttattattaatagtaatgcaccctttaaaaataaaaactaaaaaggggaagactgatgttttgtttcatgctacaaaacaatacaccattatgatctgttattattcaaaagcgtaacgcagtagaaactataaaaaaaaaattaaaccaaagaacaaaataagggtcgttattttcttaaatttcttctgttggtttttttttcttttttcttttttttacaactgttacaaataacaaaaaatcaaaaataaatagaaaaagaacaataactcttgatttgtcattattttctatgtattgttcggtatttcattgtataaagcagcaatattgttgtatagatatgctttttcgtctaaaagttttagtggaaatgtggctgtgttttttaatattttgtttatttttctgtatgttgagtcagcctcaatgttcttttctactgtgaaaataacttctctacttctcatttccctagaaaaaaacattttgggaaaaataaagatgaatcaataaaaatttatccaaacttcaatgattcacaatcaacagtgaatacatacaataaaataatgttaaatataatcaatggcaagaaatcaatctacaattttgacacatacaaattaacagtatctagccaaagatatcttttgaagtaacaattaactcaataaaataaatataacaattcgaacccttgtttcagatcgaatacaatatctttcttaaatttgaattctacaagccaaacttattaaaagtgcggtagtattgaacacgttactataccatatttttacgatattttatttgataaaaatttcttttcttatctttgaataagaaaacaacatcattaagagtaaataaactacacaaaacaccaaatacatgtgtttaatggtattaaattaaaaatgtgtgctgttaaatagctataccaacgctcatttttacccttctgtgcggaagtaatgtaaaaatatttaatttaatatcatccaaatttactttatctatatctaatattacaagatgtatattttatcaacctatgatatatatatatatatatatatctaaatagctgatagttgcttcctttgtttcatatagtattatataatacaataccaaatacctctcccatataaataatatccacaaaaaaaacaaaaagagaataatgtaaaataaacaacatatcagttttctttccatctatggccacaattaacacacttatagaacgtagtcataggctcatcagccgatctaatctgtagttggaagaaatatgcactttcaccaccacatttatcataattaggacactgaacttttgtttgatcaacgttatcccatccaccaccaagaacatcatcgacttcctttctttccaatttctttctatcatatatctctataccctctatagggaattcatatggacatgaaggacaggataaagtatatataccactgtctgctaatttaaccaataacatattattacatgccggacaaaatgataacatatttgatgttgttgatttcttctataatttgcttaaccccaaactttctgtaaagctctaccactatctaatctgaacaataataaaaatcaatgaaccaatgtacgaaaaaaagtataaacttgacttgatattgctaatgttccacgacctaataactgtatcccctactgtgcagatttcaaatgatttcattctgttaatgttatataaaaattatccgatgacttgtaatttcaaacattttcatttttttattttttttttttgtttctttttttttttttttttttggagaaagaatacatatttgcagttgttacatctatcatatatcaataacatacacaatcaaactaaggtcataaagttacaaaatattacctattgaaacagatatattaatatatacaatccatatacgagtgtacattttatattaatattatagtattatacattgcaagttaaactaataacataaaaggataaagaagaaaaaaaaatgaatatatttgattacaaaaattaaacatgatgattatgatactagaaaaataattgaaaatccaggttcaaagttacaacttgatgttaacaaaaatgacataagaaaaaaaataaaagaaaataatataatatcgtgtcttaacaccaccagtgatacaatctaacccaaatagatgaatttttcaatttaattctattttcttcctcctcttgtttaataaattctggatcatagatacgtctatgataatctaggtcaatctcttctaagttagttagaagagtataatctttgttataaatcatataaccgaagtaaaatacaataaatataggaaatgccaaataactttcaaaaaatgattcagcatctgctttaccctccccaataggaaataacgccacccagaattgtgctataaagactaaaatattaaagaaaacaccatatacagatccccaaacacctgttgtagatagataacctaattccctcaaatctttaccttgtatttccatggcttttctaaatctaatatgggacaaaaagataccagaccatgtaaacaattcacttaaaccagcaatggcagctaaccatataaacacttgttcttcttgagatgatgcagctgcaaacccaatgacaccaaatacagcacaggttagtaaagcaactaatggtctcccttctctatcaatgtatgacaaaatctttggagcataaccttgttgagctaatgaacaaatcattcttggagctgcatataatgcagagttacccacagaaaccacagagataagaataacagcattaattatatgaggaaccaccttaacaccgtgaatcgatgctgccaaaacatatggagatgcatgagtggcagaacctccagcacccattaattgatcatcattatatggcacattgaagccaattaaaatcatcgtcagcaagtaaataaccacaatacgataaattgattgttttgcagcaattggtgtagatttacgtgggttttcttgctcattaactgaaagaacgaataattcagtaccaccatacgagaaataacctgttactaatatgtaacaaatacctttaaatctaccaatgtttgaatctgaagcaaatgcccctggtgtatgccaatatttaccaccaatgtagccgtcgaccccagctccaccacaattgacaacaatcgagaaaataataaaaccagcaatcataagaattttgcatgaattaaatataaattcggtttcaccatatgccttgacaccgaagaaatgaataaataataaaaatacataaaagataagcacaaagatgtccccatttactgactcagtccaatactttataatcaaactagtagtgatcaattctaaaggcaaaacagttaaccattggatagaacataaccagacagtggaaaaaccgtatggtttcgaaataaaaatcgacatataagtattataattaccgggtaaagttgggtaagtaacagccatttcaccagccgcttgaatcatgaaataggtgacaaaggagactaaaccatatgcaataactaaggctgcaggtccacctttactcaaacctgctgcgttggccacaagcagaccagtaccgatacctgtacctaaagtcatcataacaacatgacgtgacttcatttttttctttaacttagtgtctgatccaatggattcagcaccgtcttccaaatcattactctttgcatgtgtttcttctgctcttttaaaagaatcaataaatctatgaaataaagtctgcctacgttgaaaatgttcagaagtctcttcaaaatcacctgtataattctgaaatttacctgacagcctttctatagaatcatcatttgatgcttctccgttgtttagatttctatctgttgtagtgaccacatactcttcttttacttcaaaatccttctcagtgggaggcatcttgaaacaatatgtgttatgagtgaattatatgcagatgtataaggatatgaatgcacgtaactgtatattgttcgtaattttaatccagctatctttctcttttaaagttgcgtatagctatatatggagtggaaattaatatgccgatgaaataaattaataaatgtatttatgcttaagttatttcaattaagtgcaatgcaaaaccatcaagaaccctctcaaaatataaaagaatttctttttttctttttttctttttttttttttttttttacgtttcttttttttttttcttcaatgaaagcggctaacacttctgttttcaaaaaaaaaaaaagaagatgaaaatgaatctaaaaaatacgattagagagggaagaacatcacgaaaatattcttctatagcaagtttcaaagagctcatcaagaaattctgcaaaagacaaaaccacaaagtaaggaagaaacaagaaggaagaaggttcttaaattatatacaagattcctccgacgaagcattgaaatatacagaacccagaggaccacacgaaaaaaaaagaattaaaaaactgttaatataatcttagacattccatcagaacaaacagacaaagtcttactgttatagaaatttagataaaaattagtgaaaacaattactttacgttttattgcttgagtaatgaagagtcattatcttctttttatttttttttctttttgtttcttcttctcttgcttggaccttattaaattacattagtatctcttctcaggcatgtctttctgacaaactcaactgggtgtagacttcttgaaaaaacaagtgccttggagtttggaagagggggaccgattgaaaagaaagctaagaaaaattaatagtgcacgcaccagtattctttgttcaaatcatagtaagagccgtacgtttattactaattttttttttgaacacctcgacccaccaggaaatccatctatacattatattacaatcgaatgtttaagtggagatgatacacaagtacttttattttagcgagggttgttcaaaaaggatcattgaaaactgccctcttttttttttttttttttttctaggggggggggatggggaagggagaagaataattttgaacttcaaacggctctaaatttttaataaagggaaggcaataaaaaaaacagaagaatttttccgatgactaacccaatcacagacataactaaaattcttgtcaaaaatttaaaaaacctcagtgttttgattatagagctatatattaaaaaaattgtttttttggaaccctaagttttatttaacagttgagaaagtaatcaaagttgaatatataactaaataggtacaccttcttctaataatctacatattatttattcatataaaagacaaaaaaataagacaagaaccatcctaaaaggaatacataacagaacactaaaatttattgatatttgataaataatattaatatatatatattgattatgcttcccttccccccctatgataaatttaaaaatgcatattttctatgtgaagataaaatcaactaaatgcatgaaaaagatcagattctttctcttacaaaaaatatctaattccacaatactgcatagggttgagttatgaatatgctcatataacttgcgattgttttagtcctgaaaaacaacaaatgttaaaagttgggatagaaaaaaatttatagaatactcttcctccaaatatactaggaatgtcccatttttttttgtttgtttatttcaaccctagaagacaagatattaaaaaaagaaaaaaaaaaagtaataaaaaagaccctttccattgatccaaatttcttttcttttgaccacgttttacctttcagatttccatgattatttcttcagttttggtccctggaacattttctcgctctctttctctttctcttttgtatttccttttttccgcttcttcttgtctggaaaaattaatccttgacctaccaactacttgcttaataaaagaaagagaaaaaaatgagaacacaattgctaagttcttctatcattctccagaattttagtcttttttttttaaaattgatttttctattcctctatcgggttttcgcagattctatttttctctttgttgaacatcacgaaaaaatctcaggtttctcgacggaattttggatttcacagataaaattcgagatatctgtagagacattccgcaagaaatccctgcacccccctagccctctggaactttgacgtgcgaaaagcaactaaagggaaagaaaatagcaaataacaaaaaaatcaacctcacaataaatataatgtagaaaacaaaagaaattatatctttttatacaatttttataagatggaatgatttaaataagttttatttaaattatattcacactgaagtaacgaaaaaaaaaattaaaatttctcgagtgaaaccataagataaatatatatattttacttgacttcaaatcaaaaatgtcacaaaagtttcctttattaaaaaacaatcttttgttaagaactttaaacggagaagacgtcgaaagaccaccatgctggataatgagacaagctggaagatacttgcctgaatatcatacagtgaaaaaggacaagaatttttttgaagtctgtagagacgcagaattagcctctgaaattacaatacaaccaattagacactataaaaaccttattgatgccgcaattatcttcagtgatatattggttatccctcaagccatgggtatggatgtcaaaatgatagatggtgtgggcccatcttttccaaatccactaaggacaatctctgagtatgagactgtattgaattataaggtagatgtcgagaaaagtttacattgggcttttaaagctattacattgactagattaaaactgaacggtgaagtcccgttatttgggtttgttggtggcccttacaccttattaacttatatggttgaaggtggtggatcccgtttgtttagattcatcaaacagttgatcaatgaacatccagaatgggcacataaattattacagaaaattactgatgtggcagtagagttttgtgttaagcaggtccaagcaggtgcacaagctttgcaagtctttgaaagttggggtggtgaattgtcatcaagagattttgatgaattttcattaccttatttgatccaaattaatgaaagagtaaaacagatccttggtaaggataaagttccaatgattgttttttctaaaggttcttggtatgcattggacaaattatgtgactctggttatgatgctgtttccttagattggttgtggaatccaaaagatgcagttaaaatcaataacgggagagtcacattacaagggaatctagacccaggtgtgatttatggtagcaatgaagtgatcaccgaaaaagttaagtatatgatacaatcttttggtggtggtaaatctaaatatattgtcaattttggtcatggaactcatcctcatatggaccctgaaaaaattaggtttttcctagaagagtgtcacagaataggatctacataagctttgaaaagcaaaatattactgtattttataaatttatttatttgtatttttttcatatgtctacttcatatatatgtatatatacatttaatacaatttaatcactattaaaaaaagtttacatttattttgtatgatgtccattgttctgatagtttcaatcttttttttattttttttttacaggttattttactttgaaaaaaaatctttatcatcactactattaataatattattttaagctaaagcttttgtaataaacatctatcaatgggcaagacaaaatagtactcaattcaaagagtccactacggtaaaacagtagatttgtaaccaaataagtcgatctagattaatcatacataaatattattcacacatctaactgaatcacttatggctaatttattacctaaaaaagctgagttatatgtttatgaattgtctgaacaattgataagttcattaaatttaataggttttgatgaatatctaaatgaaatagatgttgctgtttcaaagctacctgattatgataaattgaacaaaacaaaggaagaacaattaaccaaagaagaactattacaattgagaaataaagctgtttctaatgtattacactgcaatgtatgtaaattgaagtttgataatcagattgaccaaagaaaacattaccggtcagacctacatcatatcaatataaagaggaatataaagggacttcctccaatgtcttcaccagccagtgggaccacgacagagaaggatgattttgcaaattttttactagaaaaaaccatttctaattcatctgaagaagaaaatgaaaatgaaagtatagacaacaatgatagcgaaaatgaaatagcaagtgaaagcggagaagatagtgatagtgatactgaagagatttcaacatacttagaggaacacctatctagttcccaaaatgaatctacattaaactcttttctgaatacgaaatcaccacatatttatttcaaatctagttatttaccatcagagaaaaataaagtaattggtgtctataaagtgctattcaatattaaagagctatcaaatccaatattggctttaaaaagctggaatgaaatccttgataagtcttctaaaatgtctgccttatttatggttggaggtggtcactttgctggtgccatcatatctcatcaaagaagaaatataaaaggtaatttaaagaaacaaaaagaaacatttcaagaacaatctgttattatgttagaacataaaacattccatagatacacaacaagaagaaaacaaggtggatctcaatctgtcatggataacgcaaaaggtaaggctaattcagctgggtctactttacgtagatataatgaaaacgctttgaaacaagatatccagaatttgttgttagactggaaaccctatttagataagtgtgacaacatttttatcagggccagaagtgtctttgataaagcaatttttttcgaaagcaataacagtagccacaatgctggtaaaaaaaataatacccattttattaataaatatgatcctagattgaaaaccttcccattcactacaggaagaccgaccatacatgaattaaagagagcttggtgcgaattaacatatttaaaatctatagaaaaacccaaaccaatgatagcctctaaacaaaaaactcaatccattgtaaaggataaatcaacagaacttcctcaagatactaaaattgcatccttaactgaagaggaaaaatattcagaagaactgatacgattagtcaaaaaggctagagcacctttactaagttccttcttaaaaaagaataaattagatattaattttagattaaaaccagaatccaaatatggatccacaccaactttgttacattatgcatcacaacacggtataaaacaaatggttattatattattatctaatatgaaagctgatcccacaattcaaaataatgtcgggaagactgcagcagatttaaataaaagtttattgattaaacaagcattccagattgcaaggtacaatttaggtgaagattttgttgattggagtaaatcacatattgatgaaccgttgagtagagaacaagtggaagaaaagaataagcaatttgaagaattaaaaagaaaagaaaccgaggaaattataaaaagagaatctgaggcagcaaaggctaatcaaaaaataaaaacaaataaaccaaaatccagtaaaggcaacactttaggaagttcttctaatgggatatcattagaatacaatttaaattctttaacggaagagcagaaaagaagattaatgagagagcaacgggctagagctgccgaggcaaggatggcccgtaatcaataattcaacaaaaagagcaagagtcaaatattttgtttaacaacgaaacatttataacttctatgaagtatatgtaagattacacgttatacagcaagttaatttatatcacttatactcatttgacaaatatggaagttaaaaaaaaaataaagacattcacacacacattatagttgttttattctttcttcttgtttttctattcataataaaaaaacaaaacgaattaatcatagaacgcattcatcattaggaaataacacatatatataaaaaaactatatgaaagacatataacataaaaaaatacatatatataaatgacatatttatttcacatgtctatataaaaaccaaaataactactagttaccccaggattcttcagaagatatctcaatcttttgcacatgaccgttcttatctttcttttctggtttcaattttggtatcttcaaagtcaaaacaccactagaataatctgccttaatgttatcggcatcaatgccgggataatcgggtaacgaaatcacacggttaaacttaccagccacattttcttggaccttaactttgtccttgttttcttcagtaacagcagaaggaatttcacctttcacaacaatttgattcttttccttgtgatactctaaatcaatgtctttcttggatttaacaccaggaacagttatcttcaattcataattgtcatcatgatccaggatatcgacaggcacacccacagcacccttgttaccattataaaaagcagatgggactaaagagaaatcatcatcaaaccaattatctaggtcagagaagaacctattactaggaaacgttaaagcagctggttgtcttggtcttcttttaacaatttgattctctgaaccagctggacgatcggccaatctaggacgtctttgtggataacctctggagcctaaaaatctgttaaaattgtcaacttcatcattgatagcatcaaaaaaatcaaaaaatgtattattaaaggacatgttattatttatatatgggtttataataatttatatgtagcttttaaaatcttttatttaggtattaagtggagtaaaaaagtgtatataagcaatatatctatgatatattttgtttgtcttggtcctttccacaaggagtggaagaattacataggaaatgagtcaagaaacaaaaccgaaataccttcattaaaattacaactctatttatatgaattcaaaaatatcaattaaaagggattactgtcaagacagattttgattacataagaaagacactttgagggatatttagttggtttatactaattgtgacagctaattatgcccagaccatttctggaaattactagaaccattgcattattacccctttcttctatttcttcttctattaaatcctttaaactccccttcccttcacacaaaaactaaactaaacaagtaactcactaccaaagtgacaaggaacacaaaccagatagaaaaaaccgcataaaaaaggatccacaacgttcttatgaaggcatcacaatatctttttcttattattgttgaagtttttggtaaagatcaaaaaaaaaaagaaaaaaaaaggggggggggagatcacagtagaggagacaaaaagatataatagtattgttctgatattcttcaaccttttttctagaacaatacatgctagcttttctcgaggcatattattcttgtttattgttgttttgatgtgaacacgtccggactttttcctttattttctgttgttttctattctattctattctattttagtctttttaccttttcaggataaaaaggagataattactattttaggaaattttctggctagagagattagtttgttaaatgaataaaaatagaataaaacagagaaactataaattaatttggacaagaaatagtttatcaactcaaatacttagaacctccttaatctataatactcaagtaaagatcattattgcctatgatataccgaaaaagttagtctattattatctttggaatataaatgcaaagggaaccaataacaacggtcgctttactttttttctctaaaacttactccactctgtacactctgaataaagtatttatgtttacacactaaaataactagttctcctcctccttgacctaaataactctgttacttatgattgaaccttgaacagttttagataataatataatacctctcccaacttcttgtggatagaacatttgtttttattttctttatttgtgtttttgtaagaaagaaaaaaactacaaacaaagaaaaaaaaataaacaaaaacaactaaggagaaaaaacaaataaaaaacaaaaaccaccaattttaaaccaatttacatatctctcggtatttcatagtgaaaccttcgattgtattcatatttgaattttttaacatatgaaaaatatgcccggagatacatctgcagcttttggactatatacataaagtattaagtatggatagtactgcagctgtgtcgttgctgctcttcattattactatctacatattcagattaataatcattttaccctgttgccatgattttaactatgactatgataaggtaaacaatgccaacaagacgacaggtagaaaaaaaaatataataaatgaaatccaaaataaaggtatgaaaaatttacacttatttatatttttaggatccggtggacatactggtgaaatgttaagattactcctacagtataaagatattttacttaataaagatactatattacatgtcggttattctgatattgaatccctgaataagataaaacatctatctggttcgtttaattgtaaaattaactattatcgatttcaaaaagcaagagaagtaaacgcgaatttcacctcgagttttaagaccatctttataacaatgttaacttcttttcttcatatagcgaagattaagtatcaaatgttaaacaatccgcatttggttcttttaaatggaccaggcacatgttttataattactgtgtggtttaaattattggatttaattttattagcaacaagttcgaatattgtatatattgaatctttagccagaattaatacttttagtttaactgggaaattactatattggatagtagatgaactgattgttcaatggcctgaattacaagctaaatatccaaaagcaaaatacttcggcatacttgtctgataataacaaataatgagataactaccataacatttacgtacgtatacatctttctttataaaaaaaaaactggaaagattagccgacgcctaacctggcacccccattaatttataatgttccgtattaaatattcattaagtaaaatggaatgcattcatatgtatataattatatatgtttataaaagcagatacatatttcaaaagaacaccactggtcacctaatccgaatcataactatttcattaatggaataaagtattatttaaaataaacgaaaagaaaaaaaagaaaaaagaacgaaactcactttatttttcttagtttctggagttgatgatatcaacaaattctggcttcaaggaagcaccaccgactaagaaaccatcaacatcagccttgtccttgaaagaagcaacgttagaaccgttagcagaaccaccgtataagattctgatttcagaagcagccttctcacctaacttaccagctaagaactttctaatagaagcgtggatagcttgggcatcgtcagcagtagcagctaaaccggtaccaatagcccagactggttcgtaagcaataacaacgttggtccagtccttaacttcagcaataacagcatttaattgtctttcaacaacgtctaaggtgacaccggcgttcttttcttcgaaggtttcaccaatacacaagatgacaccaacaccgttgtccaaagcgaacttggtcttttcagcaaccatcttgtcgtcttcaccgaagtaagttcttctttcggagtgacctaagataacccacttagcacctaagtccttgatttggtcaacagagttttcaccagtgtaagcaccagaagcctttaagtaagcattttgggcaccaacactaacttgtggctttgtaacttgagagacagcgaagtctaagtaagcagctggtggacagataacaacttcgacattttctgggatagaagcagtgttcaatctgtcaataatttccttaatggaagccttggaaccgtttaatttgaagttaccaccaacgaagaaagttctagccattttttgtatattttattagtgtaatatatagatgaaacgttttatctacgctacagggttttaactgtcaaggaaagtagtcgagacttaagaatcgaaacaagaacaaagagtgtgcgcatacaggaaaaaggacgaatacactgtatgtaaagactgagcgttatacgcgtagaaattgttaccatatacgcaagctcactgaaacagaagatctagtaaatacagacctatatatataaatattttactgaattttttcaccggctagtaggaacaaacccattttcatcaattcacgatcaattgattccttttgactctttgtttctttctttttctttccttctatttttttagtaaaaaatgactgttgaaatgaacaacattacacaaattgtactcttccaatcaggaaatttccaacagatatataattgtttttctactaacatgtgatttatatctctttatacggtggtactgttcccatttcaagacaatgaatttgtggaagctaaccgaggaattatatacaatgtggtgtgtgggttaattgaaaacaagaagctcgtctttcatctttgttctttcagattattgctagaacttaaggattttgtcttattttaaaaaacaactcttcttcttctatcccccctcactccaataaataacgaaaacagaaatattatatgtaacaataattgaatttacattccgaacttactacatacaaattatacattttatacagtctaagatattgcagtattaaagattgggatattaatatattaaatgacaaaaaaaatgcaatgcaactattaagaaaaactcactaagatcataatattgttgtaaaaagcagcgtccaagtagtttcttataataaacttctccatacgaatcagaatttcaagcttaaatagtagaaaagaaagcaaaaaaaaattttttcaagctcgtcttataataataaggctgcaatccctgctaaaccaagggtagcacctaagcgtaaaccagcagcaccattttcagattgttgaggaatagtaattaaaggcgaagcagaagttgaactttgtttaatggaaccaataatagctgttgttttagcagcggaagagacagattccgtggtttgagctaatgtgcttgaagaggaggaagcgtctggaggaataaatgtgtattgttggttgttgtctgcagtagtaccaaccatgtagaagtagttagaatttggtacatccttgacataaactttgtagttagatgggtatgctgaatcagtagttggaacaccataaaacaacttgttaccgttcaaagtaacaagacccttttcaatagcccaaccagtagcagcgttgttttcatcaccttcggacatttcaccgttagaatcgacaacagcatatttaccatttgagaacttcaacttaccagcgtcagtaatagtaaaaccaagaacgtcagatgatgaagaaacagcacccaaaaataaaccgctaccagaatcgtagaatggcaaaaggtgaatgttcgaggcagaatgggaggaaaggacaccaaatggttcagaatcagctaaaacattttgcagtaaagcggctaaagagactaaagtagaaacagcagtgaacttcattgtaacttgttttttattattgaaaaatatgagtggttttctaatttcttaatttggaattgtgtcttatagtttactattttggtaggcttttttgttggcaaaagcaattcttagaggataacgaaagaataatcaaatactttctcttcaaacatttctgtctcttttatataaaaaatcttgttattggacaaggaaaattcaaacaacagaaatttaataaaactaatgaaataaggcatcaaaatttatacacatatctgcacacactcaaataagatttaaaaaagttttacccaattgagataaattattacaaaaagggaaaattagaaacattaattgatctgaatatacttctgttttcggaaaaataatgccatctacaaataccaattttcctaaatgggtaaatttttattttgagaaagggtctgctttaaactaaaaatagaagcatattacaaatctatggaatataaagaaattcacatcaaatgtttggaaatacgtaataattgttatgtattacttgtctaaaaatagaacaaaaataagtatacaatttaatttaataagatttaaaaattatcacttgattatttttaaaggctcttatcagaaaagtttattaattcaatctattaacccaaatacaacttgtatcaaataaaaaaagtattcaaaattattgaacttccaaggccgtatttctcaactgaaatattattattaaaaattaattaaaaaaagtaacaagaacaacaaaagttttaactaaataagtaagatattatcaaatgcaaaagataaattgatagtctgaaaaaaaggtatatctctttttcaggtcacaataagactttatattttaatgactctagtagttgggtataaataaactattatctagagaatataatttgttaaagttgcatgtcatatagtacccaattatcaaaggtctattctaacttctttttctattgaaatgtatcaatactaataaagagtgtatatatatggactgaaaaacttgaacgagaaaatagaaataaaaattgtaataagtgctattaatgattaaatcaaaaaataataatagttaaatgcaaaccatatcctgcaaatagtattagtataatatttacatacaagtccaaataccttactagaacttataagcccatgtgtaaataattaacctaaatattcgaaactccaaatattcttatagtcttaaaaatacataactaattacttttttattgtagtaaataaataagtgagacagaagatacttaacttccattttccccttaatcccatttaggaagccttgttcttaatatataacgatcagtaatttcatctagctccataactatgacgcaaccatttggcacattcgtgaaagattcaaattcttcataggtccaccggaaccatttcataagaaaaacacgggaataaataccatgagtaacaaggacaatggcatctcttattcttttagaacgtctttcttcaaagtgtctaaataatgtttcctggaaactagctacacgatcatagacatctgctgcactttcaccttgtggaaatctgaaaaagaaatgtccatatattttcctcttttcgagaacgtccttcatactatttatttcttggaaattaccaaaatcttgttctctcaacctgggttcatcctttactctatatttgatataattttttgttggatatttttcagacaaattatgtgtggtttcactatttgtatattcaccgcttgtctcagagccaataggccaaacagcatatttctgcttccctgttggttgataggaaccatcaggacaactccttacattgctatattttagattgtactcatcaacaacatttaaaatcccctttaaagtttctctagtccttctatacggagaagtataaaaaacaatattatagtctttttctttatttaagggtttataaccttccaatggtaagcttttacatatattttcgtctttaatttcatacttactagctagctcatctactattttttcatcatcaacattcagcaaccttagtaattgaacacctgcattatgtgcctgcttccaacccttttctgttaatggaatcgcatgatttggaagatattcatttactaacttgttaatattagattcactttctccatgcctaatcaatattactaatcttggtttatgcctacttcttggagttgccgtgctgttaatttcttctttagacatttttatttgtctagtttgaatctctgaatcattagctaattcacacgcctttaaaatattacttagatggtgcttattttggtgtaccttccttctgctatcatcgagtcaaaatttctaattataattacaaatcagttaacattcccgatcagagaaattgccttcctttttgttttttttattttgcgcatattcaaaagagaaaaagacccttgaaagaaaatcaatcagagaagaagataccagaatagaaatccattcagtgcaccaacattaattatgttgtaaaaaaaaaggttacggaaaataagtaagttcgatccatgtcctaatgcttaataataaaacaaccttttttttaagtctttttttgctctaaacacttgcaaagttaatagatatgttatatgtggtacatgcattgaaatctaaagtatttctatatatacatatgagaagcatctatctttcacaaacttatagtactgaataaactgaaacactcaggaagttgttgaacaagatgcctaaaactatttacccaacattgaaactaatgtaacattttaagaattatatttacaatatcagatattcaaaactgcacactcccatgaaagtactagtgaaacacaccccaagggggaggatttgcattacaattcgatgtctttttttaatgaaaaatttctacttactttattaattggtgcagcgaatacaattgcaaacctcttcagaattttcttatattcaaatattttaaaacagtgacttaaagaatactagtataaaaacattcaatacttattaattagtaaataacctatgtatgtgtaatatcaaaaaaaatgtttctttttaatataatactcaaaaaaatagtaaaacaaattaattctaatctaaacaacgtctgaactttcattttgaaaattttccaaaaatcttgaacaatgttatattgaatacaatgttaataaattaattattatttatttatgattgttttggtccattttgttttctaataaagtaaaatataacatgttagtcaattaatttacttttcagtatacaattaccaacaaaagaaatgtgctattatttgaagcattataatataatttttagcttgtctataaattttagaatgaaatttacagcctatagtttaattcgaaataaaaaaaatgtgtttagtatgaatgctttgaccatttgtaaaaaagaatgtttaagaaccttaaaaaaacttatttatcgtatttgaagttattatgatataatagttaagaacacaactccataatttaagtttatcagaacctgcgtagtgacaacataagtattggaaatagacaagttccttattttcaactaagacccaatgatacatctttttaaggtgttcttcatatatttcttgttcaattttggaatatgataaagcaagaatttattctgttctttcatatctataagtaaaaaatgtaaagaatgtcttgtgatgaagttgataatttttgttgttctttttcttgcaatatttttaccatatattgttttacacttttcaggtttgataataaatagattcataaatttttgttttaacgtcaaacaaagtaagattttatgtacaactttctcaaccaacgctatatgctcattttttatcatgtattatatttttattttcttattataggaaagaaattcatggtcttttttttttttgaaaactagcaaaacctttttgcctcaactaggctaagagtcaaaaaatcctgacgaaatttcttcaaaagcaagataaccaatcttaccctgttcttgaaagcccaactgtgtatatcatgtaatactcatgacatttgttgtcatctaatttatatatcgccaaaagaataaaaaaaacatgctctgtcattttgggttatatcatctttgttcagtacatatttgtgacaagaaattacaaaccagccttcttatgttaattcatcttaaattttatatcaaggtatgttattttaacttttgtacttcttggaaaaattaagtaatgaaatagtaagattgttaattaatagcaaaaataatttaaaaaataagctaaataatattctatagcagggtaggaaatttcaaaatagtttatcaatttatcatatttagtagtgaaatttgagcttgaatagaacaacaacaacagtttaaaaatatatctaagtaaaacaaactagatcttgctattcctccaaaaattatttagaagacctcacaatattgaggcacttttttgagtcaaaaaaaaactctttttaagttagagaataatgcaactgtgtcgtttgtttcaagtgctagcatctagagctggattttattttacaagctggtgttttaagaaattctgtataatgtatttctcttaaaagtatttttaaaaattttaaacagtagtgacttaagctgaacttaattctgtattgaaaataaatcacaattttcagaggagattacgctctcgacaacacactctgcatagtgtaaaataaatttgctattgtattttttaaaaaaccctaagctggccctctaggattcaaaaaacaactgtgaaaaatgaaaaataaaaaggaagaaaagaaaagaaaagaaaaaacaaagaagttcctaaaaaaggttttttattgcttttttaccccgcttacaacaattgattataccttcccaaacaattacgtaattattgttcttattgttttttttatttttgcatatctacatataatatatttttaaatcttgcaaggttgttttgactaacctgtcgaagaattccttttaggaaaatttttttccttttttattgttttcaataataaatagttcttttatcccttgttatctattgtcatgtattgttgttttggaattgtcaaattttcagatctttatctcaattacattttatttccatatcagtgattattttccaatgaaatttccccttgatattaagataataaacaataatagtctttacgcatatttcttgaaatgattagaaaggatgataatgaactatttcagcttttattgagaagatgtgtaaaagttttcttttatatataaacaaagataggtctgtttaacaatgtttgataaactatttctcactatcaccaagggaaatacaatcaataaatatatttccaattttattaatttacaagggaagcaggattattccattccgctaaattaagaaagtttacttatatctaattgatgtgttctatttaagtagttcaacaagccaaagcttggaataaacaaacataatgatatcttcattttctgaatctattatttcaagttttttaggcagcgaacgtctcaatacctcaaattatttttcgagttctcaagatataattaatggcagtcaattccctgttttttcacaatcatttgatagatatatatatgatagacatattcagtttaggtcagaattatttgtaaagaattcagtgactgaatattttgctaatatatataaagcattttattgtccaagtttcaaattatctgaagaaaatgaacagcaagcagtcacaagcaataataatatagttgcacgaaataatattatgcgtgaattgttcaaaaataaagtagataatcttaatataaatgataatacttctgactgtgaagatatgagtacagcttctgatatcatgggtcaaatattttcagattcagagtattcattggtatcatctcactcatccccatcttctccgttagaaacattatttatcagaaataacactaattttgtgtcaaatattaagaagaaatggttaagaaataccttatataattatgggaaaaagaataagtatggttgtaaattttgtgggaagctcttttcaaggccatcggccctaagtactcatgtaaatacacacacaggagataaaccatttatttgtccataccaagattgtaacaaggaattcaatgcgaggtctaacatgacaagacattacaaattacattttagggtttcctctggtgggtatctcctgccttcaggaaaaatagtacataagagaccatctttaaaacaactgactaccgatgatatgaagactatataattcttgtaaattttataatgttatagacacttttcagtattaaaagttaacaattatactatttattattgaatgaggcatttctttattcacttttgttactagtcagtgcctatttccacgtggaaaggggtatgtaattaattgaaaattaagtgattgaatagaggaaaataacaataacagtccggaaaaatctctaaaaggtttgatcaagttgttgtaatgaactattcatacagtttctcccttaagaatgttgacgtcaacattcctagaacataacaaaaaaataaaaaagaatgtggtattatttaaaaactatagaaaaaggcattattagttgaaagaaccgttttttctatttttggtgaggttatttttactcaaaaaaaaatttcgcatctcttttacctcttttcaataatattcttcgtttttagtgatttgtacattccctttcgtactcttcgtaaaaaattttagagattctgaaatcttaataaatttcctttgtttttctctaaaggattgactaataaactttattaatacggaaagttccataattggtgttataacaaaaaaaattgtgtttttttttggtattaaccttaaaataaagttttgcttttattttttttatattgtgttagttaagttacattttatttatgcattgctctacaaaagctactctataaaggtttttttttgtttatttaggcttgggagaacaattgttttgagacggagaattatatttctcctatacaccaacctaccataattttttcgtaaatactcatgctactgggacaagcatgtttttattctcattttcgttttttctatttttattttctaaaactaacttattttttttcttgtattttgattagttcttaaataatttgtaacaataagtatatgttaacctttgtggttttttttaaaaaaaatactgtaagaaacttgatcagactccagtatatacgtaattctatgggtaatatctaagcgtctagctaaagcattgatacgatcaggcacatcgttattaaaataggatactaaattggatcagtggatttccagggtatgataattacattaagtcttgcttaagagatctctggttgttgaaagatatgctacgtataattatcctatttaaatatatcctagtatcatacaagaccaacaataagcaacaatagtaccaccagtattattccagggctattattcgtttttagttagagtccaagtaacagtactcatatttacactaattgccatggttcattcatttgcttataacaactcttaaatatataaaatatttatgattatgttgaaataatacctggtgattctgattatttgtaaaataataggaatagtaataatgattctaagatagtaaaagtgatgtattgaacaaaattaatactcttcgaactattgatattaacttactaaatataattagatctaagccatgtcaataatattatatacctattaagttacctttaaatttaatgataatcctttcaatgggccataaagattatatataaagaaactgggagttttatatccacttaaatgtcaaaaatgctacatatttttggttatatgttttgaaagaactatatctaactactcttgccttttagaaaacaaaaaaaatcttatgttttgtttcattaataatgcagtaatattatatagattaatttagcctaatgatagcttaacaatacatactattatgaatgtgtaagaagatgaatatagatacatgaaactccaaaatggtctcatgaaagcagacactttatttgttcatcatatagatattaatattatcaactagtttttaggttgctacaagtatacatttttacagttgttatcagtgaatttaatctaaaataaaaaaatgctaaaataaaaaatctcactgagactgcaatatttttgtaacctctaaaattgaaagcctagtttatctattaaacagtcaatagcttcaaaatttaaatcgttattagcaaaacttagatgtttctcagataaaatatgttcgcccaatgactcgtacttgactctgcaattttcacagtaacctgaattttttaccggttgttttctaattacaggtttgttatctttatctcctacctggtcagatattttcttctgttgttgattgttattattgatgtcgtccttggaaatggattctcttccaaaagaatgttttaagtttgaaccacctctacttaataatggtgcacctccattgatagtgcttctagagtttctggaatatggtacctctgcattagaatttgaatatctttttgctggaccatctaactttctatcaactaatttattcaaagttctaatatttttactcataacagtggatttagttggacctaatccattaccgaaggacgtggcaacatcattagattgatgagctccacttgctttgatctcaaagggtacccttgattgtctttttgatgtagcacataggtcgtctggtaaatcttcggtctcttgtctgcttaatggaattaatggtatatttttcaaagatggtatcgaaactggttctttccacgttttttctacaagtttctttttcccattggtattattatcattcttcctcttattttcatttacctgtagtgcaaatacattgttttctgcatcattagggttagatatttccataatagatacttgtgtatcttctactttatcattcctttcgacggtttgagtaaccttggcgttaatatcaccatttatgttgaatttatcgttatttattgagttagattttgatgcttgattaacatttgtttttacctctgctaccgtttgtgtattagttgattgatggttatgttcacttcccttaattaatttctgatacattaacgacgaatcttggcaggcatgtggtaaaaatattagaccttttgcaacagcatcacaatctgatttgcttggaattgcatgatattgatataattgacgtagtttcaacgcatacggtaaattaatttgatctcttttatatcttttaagaattcttttagcagaattctctatacaatatctatcaccaataaatggacatctaccaaaagtgcccatttttaaagttggatatggtaaattattctcgtcagccaagtcttgttgcctccattctaatgtgattattggagcccaagtttgccatatatcatacatataaacgtaggagtgtttgaaataatgtatatcgtctcttttagttcttgggtctctatcagtaggaccatacagtttctcattttctagtagatgtgatagggtaggagtagctaaaattggtgatttattttttattagagcattgaaatctacatccaaatttgtcaagaacctgaaagctttttcataaccccagactttcataaaattttttttagctcgagataatatatccttatcgttaagcaaatgtatattttccgtaagtctggcagtgacaacaatagtgacactagtgtcaaaaaattgagttatctcggcaccaagtgataaaaatccccttttcaacaagtctctttttttatcaagtgcttttttggtctttatattgtctatactatcttcagttgtatcgaaatatattcttgagtcacgtctcagaattttcttccaattgttttgccaatctaataattcttttggagtcactttattttgtacatttttcaaagctgctggtttagatacaagtactgcaccttcaatagacctggctctctccactcttggtttctttttttgttgtggttctgatctttctattattcttttcctcacaagcaaagtattattattctgatcatttgaaccactgtaagatttgctgtgatcaacatcattcttattgttataattatgactatatttaatactatcgtttttttcttgacttggaacaagttgaatttcctttccgttttcatttaatggtactcctcggagattcgcatctgtttctttgagtggggatctattgatagctttgattggggacaacaccattttttagcagttatcttttgtatgggtatacaatatatcaaaagagaagtagaaggatatacgtatataataaattgtccagtattcttcaaaaaaaaaaaaaaaaaaaaaaaaaacaggttattgagattctaaaaaataatgaaaaaaaaagaatcagtagtagtttgttatatccacagtattcgatcaattctcaataaaatatcaggtattttgattgaagaaacgtgtcactgtactaggttttgaaagaaaataaaaaaaatagagaaagagagagagtaaaaaagtaaccggatacttgatctttgattataatgtatcttgtttatattatatcttcaattggtttatgtttctatgttagctgtctttaacgtatacttaaacgctgatggttatgcagtaaattttactctaaaaaaaaaaaaaaaatcaaaaaatcaaaatctctgtagatatttattttgtgcatccattttatcaaatagttaattatcatttattgagaaaagaagaaattcgtgtcttttgatttctgtattttttgtttttgttttttttatttttctattttttttttttctcatttagtggattttgttattttcgcttgtttgttttgccttactgaagtcctcttaactgtgtgatgtgtggatgtctggcaccttctggttttttcctttttcttttgatttggaggcgcgtcgcatttggtgtcgcgttatttcctatttaggaaactgttaaaggaagccctaaagtaaaatgcaattaatgtaacaaccctaaagaaagacccgggactttatattcaaagaaggacttgtttgaattaatgacaatttacacatgcaaattaatggtattattgtatatatacatatatatatatatatacatgtatatgtatatttatgtgtatatttatatgtacgtatatgtatataccgaaaggaataatgtatggttgaaataatcttttaaatacatatgctaaggggacatttcaaagaaagattggggtagcgttaaataggcataaaaagtgggaaagagacgatgaccaagcatgttttaaattagacggaataagaagaggttaagagaaaggagtgagcgaataggtaaaataaggtagcttatcaaaagattatttcttatctattctttccatctcttctacatcttcactttcatcatccgctttatttggttgttttctatccattacagaatcgttgtctatactatcgtcatcgtcgtcgtcatcttcttcaaattcgatatcttgttcttcgttttcatcgtcgtcgtcggcaaagccgcccgtatagttataaacgtcatcattcaaaaagtcttcttggtagtcattatcatccatatctgaatcgtaccaaaaattttctgtcatgcttttacttagaatgttattatcaccgttccgactaatatcattactactgccatttctgttattattgttattattactactaccatctcctatggaattgtagctattggtattatttgaactcgacaaattaactgttgattgagacatggattttcttgcagaagaggaaatataggcggattccgatgttggcatcacaaacccagcgggaatatcttgtttcgatctttcgacttccattctaacacgttgtttgtattgttctgggttctttctataatctacagcggcatccacgttagctggagaagaaatgtttggatcctctagtagggatactatggagatcaaaacagattctacggtttgtacgggggaccaggtctctgcatctggttcatcagtcattggatcgccactttggtgcaaaatagagatacaaagtctaccatctctatagacatttggatgatagatggcgggggtaaacctgaactgtggtggggagaatggaaaatcgttgggaaacctcatttgtgctttgaaataaccaccatgatatatggaatcctcgtttaataccattacaccgatattccaaacaaatatgttggaatcatcttctagttcgatattgaaggatgggatagcctttttggggtcagttaattctctatattgtctcagtaaaatacttgcagcagtgttcttacgtgaactcatggttagtaatggttggttaatgatttatcttgttttttttttttttgcttttttgttttctttctcttttatcttttctgcgttaataatatcagttcacaactgggaaaagtgtatatgttcgtgtggatatctgtgttgcacaaataaatagataaacgaataaatgaataagtgatattatatatttatactttatcttttgttaagaataagagactaatataaaatgtatttaaaagaatgaaaataggttacatagagagaagggttatcaaggaaaaggaaggaggagagacaaagaagaaaggtctttttttttttttctttatcctttgatactgaacaaaaaagaaacagaggtgaaatggattgtcaaaagagaaaaagaggaatgaaaatgaaaacgaaaataaagacaaaaataaaaataaaaataagagcagcctttgagctgtttattttcggttcttattttttactgctttttataatatcgagccgttgaacattgacaaattttgtttttttctttcttttctttctgttttttttttttttattttttttttatttgtttggtcatattttttgtttcgtttttgccactataaaacgttcctttttttatttttattttcattttcttacctttttcttactttttttttgtttttggtagttttattttctctcacttgggaagtggagaagggaagaattggtaagctgtggcggttacatttgatgattatcaaactgtgtcaaatctgcaagaaaataaataatgtgggttcacaaagtgttgtgacatgtgtttattagactgcttcatttattttgaagagttccttgtgcttccaactatataataaacgtacataaatgaagcgttacataaaatatttgttaaaggatacttagccctgttgtgtacccgcttatttatttacttgtgatctttttgatttgataagattgttttatcagtgattatattcataggaagtgaattaagatatagttggatgatatgtacgtacgtatgtatgtatatatgtattctgttacaatacggttatttatgttccagagagatataacgatgagtaattttacttactaatcttaattatgtatatacgaggtgaaacccgcctcttcttggtaggggaagaaaaagaagaagagtacggattctatttccgatctgtttccttagtatctcaatccgggtatcttccagatttgtttttttttcttttttagctgtttccaatagtttacagcacatagaaacatcttcaaaaatgcaaaaaagcaacataacattcatacatccctgcaattatacacctctcaccctttttcttctcctcttctttttacaagacgtatatatacatatatacatatgatatactattacccaaagaggaaattacaaaacaattttttcccactttcttttgttctccttccctaaagaagtaatagcattttcttctccatcttttttttttttttattttcttttctttctgtccattttatttcttgttaattgcttttgttgactttttcttagtagcggcagtaagatttcatgcgacttgagatgttatgaattttgatatgtttatagtttatgttttctattttctgtttatgtttgtgtatacttgaatcacttacgtttcatgtttttctatttcctaattaggtgactgtgtaattgtttggttcgtgttatttttctgttttctgttttttgttttctcttcaaggaaaaaaaaaaaaaaaagaaaattttttttgtgatttgaaatttcgacaaaattggatcaatcaatcaatcattgaatcgattatgctgctaattttgtttctttgctggtttttgatggtggaaaattctggttgagcaggttttttgcaacgtcttcactgtagtgtgtcctccttttgatttctttttatagtaactggtatataaatactatatatacctatgcttgttttttattttttgtcccttgtacatgcccactattttctctccacgcttgtctttctgttgcgttcttggcactcttttctattttcacatatgcatatctaatacacattctttgctattttttttcttttgttattctttatagctctatcctcgaactcgtttactttactttttgtggattcatcaccttaagaaggttgtcaagaaatatactacaaagtgagtgatacaatattcttcctgaattatcctttgctttccattaattaatttattttctttctttttgattacgtatagttatttataaagttcgtctttttcttttttctgttctctttctttaatcacaactctactggtttttttctgtttttataccttatttgttataaatatttactatacttcgaagtaagaaagtgagagaaataaggaataatattataatcatttattattattgaataagtgatccatttacacgcatatacatacacagcatacacttaattttttttttataatttttttgttttggttaactcataatgcaattcaaatctactgtattatctctattagctttatcagcctcttcagcttatgctgcatctagtactaccagctctactactagtgcaaatccatgttccattggttccaaagctactgctactgctcagactgatttagataaattggcttcttgtaagactatcactggtaatttgactatcactggtaacctaggttctgctgctattgctaatgtccaaaagatcgacggttctttgattattaagaatgctacccaattagtcgctttttctgctgattctatctcagagatcactggttctttagaattgactgatttgactatcttaactacagcttctttcggttccttagaaaaggtcgataccattaacatgatcactttaccggctatttccactttcaactccaaactatcctctgctgataacatttacatctctgataccagtttggaatctattgaaggtttctctgttttaagtaaagttagcagcttcaacatcaacaacaacaaatacttgacttccatgcaatcttccttgaagaccgtttctgatgcattatccttccagttcaatggtaacaatgcctctatcgaattagataacttggtttgggctaacaatatcactttgtctgatgtttctttcgcctccttcaagaacttaaaggctgtcaacgcctccttaggtttcttgaacaactctttgcaaactattgaattgaacaacttgacttctgtcggtcaaactttcaccatttcttacaacgatgaattaaccgatttgaaattcgataagttgactactgttggtggtggtttagttgtcactaacaacaccaacttagttaatattaatgctttctctaatttacaaaccgttggtggtgccttaaacgtcttaggtagattccacaccttggacttaacttccttaaaatccgttcgtggtgctgctgatgtccaaactactgcttccaacttctcttgtaatcctctaaaaactttacaaaagaagggtgctattcaaggtgacaagttcgtttgtaagaatggtgctgtttcttcaaggtccagctccgtctcctccgtcacttctaccaagaaagctgtatcttccacttcttctgctgctactactacttcttcctcttctgactcctcttcttctaaatcttcatcttctaagtctaaaggtttggctccagttaactacatcgaaagcacctctgtcttcggtattgttggtgctgtcatggcagctttattataagttatataggaaactgtaaattagtttataatgtatatatgtttacatatatttgaattatcttgttaaaaattcattattaataataaattagtgttaaatgaaatacatacatatatatatatatatatatatatataatgtttacatgtagaaagataataataagcggtttatcgatatttatgaagttgtttgttcttcagcaggttgttttttaaatccaagtgctacaagattgtataacacaataccaactattattcttttccagttcttctctaaccaggacttgtcctcttcattatcatccttttgatttatatttctgttagcattagtggaatcatcaccatcttctttatctaatatgacattacctagttctttctttttatctgcataagtctttgtaacttttttcaatttgatcacatcaccaagggaacttttcgtagatggtcttactaaaggtaatatcacattcttataattgttattatatataggattgtctattaatgaatcattataaactaaggaaagatgattgatttcataatcccaaattaattcgtatgatagtggggttgtcaattgtaataaagtaaaacagtcgtgatcttcaataccaatacaatataacgtatcagaattaatattatgatttaaggaagaatcaagaatgtgttttatgattaaggagttggtttctttatctataatcaaatctgccaacggtactatttcattagaatctacgattgattttgcgtgtaagttgaatgtttcattataaccaaacactgcgctcaaatgtagccagaaaatagactgatatattgtaaaacttaatctcatttttttctaccctgtcttttgcaatattttttttattgtcctatccacaaagtattattttattttttttttattctacagctctttttcaaacttgcatgtatctatctatatatatatatatatatatgtgtgtgtgtgtgtgtgtgtgtgtatgtacgtatttatttaatactgttcttgtaaatcctttgatatttttcagttccttgtttttttttagaagattccaaaataaggacagaaaatggaattttaaaatattaaaaggacaggcagttggttctaacttgagcccctggagttacgttaaagagagtgttcgtagtgctttggttagatcataattgtagtaaatttatagatttaacatgattctgatctaacttttaagaagttgaacaaactagaaacgctataaataaattattgataaagggataatatgctcagaaagaatttattttcaccttttttgtgtttattaatatatttaccatatttgagctatggtttgtcaactcctttagaagatccattatcttcacagaaattcaatattatatatgtttcatccttggatgaaactctagattctttggtacaatcccatggtaatggtacacttctgacacttggagatgatatgaaatgtcttataccgaatgagactaaaatgtcatttttacagcaaattaataataatgttaccatatggaatcaattgcttgaagagtccttaagtaaaggtttggatatcattgattcaactatgcattcaaaatgtttgtctcaagggaatgggttttggaaatatcaactttgttatgataatgacattttacaatatcacaactcacctagtgatactaaatttgttaacaaattgggttcatacttaggaataagtaactccagtgaagtgacactaattttcgacaatgagattggctattatataagcgaatttttagagcctggagatatatgtgatttaactggcaaaaaaagagaagttgaagtccaatatgtctgtggattaaataaggattctccaacattacaatggataaaagaagttggtacatgtatatatgaggcaagagttatgctccctggtttatgcagtttagaattatttgccaaaaatgaggataaattatcagctactcaaattgtatgtcaaagatcaggtaagcaaaataatggtaatgtttcacacatttataacattgaaggtggcattgttgatattgtagcagattttgatcctacttttttaaataatgaaattttcttgttaaatcctgtggatataaatcaacgattgatatatttattatatactggggaaatgacagatactgatgttatggaagcggcattatttaataaatttaaaaatgcattcagtacaatgattggtggaaaattgttaaaaggacctaacaatgagataataacattgaatgatattttagaatggtgggccccagtaattaattcagatggtgagttattatttactgttaccctaaaaatgttgtcaaaaggtaaagctgaattatacttaacatcaaaaaaaaatatttattttcctatgaagacggtaaatgttgttaattttagtgctcgggatgacaatgaaataaatatagcaaaccaggactcacaacttcaagaaaagatagaggagaatatggtaattaaagaaccggaatcacgtgttaaaattgatggtaataaggctactttatttttgaaaaacagtaagggtgaagtcgtatcaatacaaagaatacaagaagcagaagatcactatatttttctctttcatatcctggatgaaaatggtgaacctatttctataagtaatgaggccacagatgaattactcgtggatttatttgaaaattatggtatggggtcagtgcttgaacaactggaagaccctgatatggtcaataataatattaataatgaaaaaggaaagattgagtttatttcccctcaaatcgaaaagcaaagcaatttccatataactaattctggggtgtaccaacaaaaatcagaagataagggcttcattgatgtgtctgaaaggaatgaaaaagtcgtttcttttgaaaatattagatctgacgagattttagaggatgtagaagacaactatcataatactaatgagaatattccaccaatagaagaaaatgtttctgaaattgcggaggatgaacgacaaatcaaaaacaatattaaagttgtgacatcattggaagaagagcaagttattgacaccaacaaacaacagaatattgataaattagagactaaagttactacaaagggcttgggtagtcaaagtgtcgaatttattgagatagctaccaaacatgattctgtttatgataatcaatcagatgatatacaagaagttcaaaatatttcgactgcatcttcttgtactgaagatacgactgattatgaacttgattttacttctatattgaaagagattttagatggtgagagaatatccgatgagactagtactttaacttttcctacttctataaaaacagccatcatagatagcattgaataacataattctgagaatcaataattcctactccactggatttataatagagtaaatacaacacaataatatattggtttttacttatttagtttgaatatggattgtttggatatttaatgagtaagtattgtgtaacagtagtttttttaaaactaaactatcagttcttttttgtaaaaagaagatagaagaaggcttcgctgtaaatcctgaaatactagtctgtggataacgccgaatgtcgaggtgaaggacttggaataaccgaaactctgggcccaaagttgtgagtgtatttgaatgaaatgaacgatcttcaaatggacattggtggtaaattaatgggaagcctatttaagagagatcgttgattattgagaaatggtgccagaggtaattattagcaataatacttgtattctatctaataggtttaatctaaggaagaataacacgaataactaggactaatctatttattagttaaaatcaactaatcatataatttgtaagtgcttatatatataattaatttccatattttagtatactacctgtgataactcgtacagagaaactagaaaatcttgaatggtatataaaaaaccttttgttagtggaataattttacaaattttcaacgcagacgacagtatatattttaaataaatacatctgttggatcttaaagaataggttgatagtataagtatgtttttcgataccggattattattatggaatcactttatggcttaagtataataaatattgacacttatgaatatttctaatgatatatgtccttctgatagaagttaacagaatacatagactacattttgaatactattcgtcatgttacacttaaatggatgaacggtttcatatagataacataagttgttgtgtcaggtttaactaatatatattaaactaacaataagtacttctgcatttaaatgtgagaaaaaacttatattggaaaataagagttttattactgttgtgttcaatagaattatttttaatttgattcttctttatgtttgtaagggtcttctaaagtaatatactaaaatgcggatgttaattattatatgtgcacacttacagattatataatcgttgattccaaataatacatcaatttctctttagtggtcttatttgatctggattattctaatcttctaggtgaaaccaataagaaaacatatgagtgttaatggtgataattatttctgataaattttctcaatagttaaagatatcttaaataagtctttaagtaatttgctaccaatgttaatttgactatcgtttgttcaaatacactcacaacttggatcaagattttcggctattctaagtccttcacctagaaatttggtgttacccgagtgttgcatactttaaaatttccagttagggcttctcataatggtatgtgatacactaacgcattataatatgtggaaaacattttattttgcactaacagtgttgtgaagagatctgaggaaatgggtatttattcaggttattgtaaaaacttcgaatagtttattgtgtcatgaattaattatattttaaagttaaatttaattgggaattcctgaagattacatgttgaaatattaaattgaataatattaggaaatgttttatttagggctagaaccatttactgttattgcgttggttaaaaagctatgtttactgtttgctaccgctaattattattcaagatgttctttgagattctgcaggataacacaattaacaaatagggtctgaataactgatttacaaatacatcgtattatatggttggtaatgtttcagatatatataaaagaacaacctcttgataaaataaactatcctttgtaattccttttttacaaatattttatataatatacattaagactagaacaatacatagatatatagtcacagatagatatatataattaataaaagcaaattataactagtattcattgtaaagttattgatttctgttggaaaatgagaattgattactgttatttccataagaattatttttaattagtttttctgtatattatgtggtgtacagatgtaccataatatcgggaagacattttatttgtcaccaaatatgtttttcacagattttgaagagaaatgaaaatcttaaaagaagagtaaaagtaaatacaagaatgtatactgtatacactatataataggtatatacatgtatttagtacaaaacaggacaagcatctataacttaatgatgtctaccattaccatggacgctgaaggttccaaattccaacattattaataaggtctttatatattaacggctatatcgagcttatataattattcgaagttactttacttgttacttgcttgttatatatccaatatgtaattatgtataaaagagaagttacagaagatagttttcatcttcagaaaacgttattcttttatatgttttctggaactcgatcaactattcaacttgatatattaatgaatcagtaatccgtatcattattattagttacaataacataatcgaagatcatagaacatttaagacaatcagttatggtggtgcagaaacagaaatatgtgaacacgctgtacagacaggtggaaaatggacacattgtacctaaaatacaataggtaattctggattcaactaaaatcttacataatctcggttttgttgaccttcttattatacagtagccgttgttataatatgaaatggtcagattcttttgtatatttcggggaagcgcaaataatattaatagttattcaaataatcgagacagtaatcaactatagtcgataatataattactaaaacggtcttataatttgagtagcttttatcgagctaatagatttattcgaagttacttcttgttacttgcttgttgatctatttatgtttatatataatatataaattatttacaagaaaaggttatggaagatcatcttttatcttcagaaaacgttgtccttttatacgttttctggagctcgatcaattattcagatttgtacattaataagcttagtgatccaaaccctaaaatttattacactatttcaggtacactagtgaattagaactgcaccccaattctccaatcatggtaattagtaatacacgtgggacttattgaaacaataggtaaattctagatttgtcaaaatcttatgtaatttaatctctttattatgcagcatctaatgttgtagcacgtgtatggcttattaagacaacaaatagttctagattcattcaggatcttttgtaatcttgatggtcataactattctatttcgcagcagccgtcaggaatttgagctcgcgtggcgtaatggcaacgcgtctgacttctaatcagaagattctgggttcgacccccagcgtgagtgctatcttcctttctctagtccgtgatagtttaatggttagaatggacgcttgtcgcgtgtcagatcggggttcaattccccgtcgcggagttctttttttaaagttttgtaataatgtaatatccccgatattactgtttagggtttttgtttagaaaatgtaatagatgaaaatccgattacgagagatatactcttctagacgctaaaatagatagatatagcttgattttgtaataaccctgaggttatgtgtttctgataacagttaatcttgttgaaatctcaataatatttcacttggatagatataagatacagactctttctatatctctagatgtaatattcctatatatctatatatctatatccctaatctaagatagcgtaatagtatacatttatgtacgatatatctctacttaattaatccttggttccttgtcccttccttgcttcttggtcgctctcttgtacttatgttggttactcctgcttttatctatgtttgtaaaattttgcaaaaaggaaagtttagaaaaatatcgtcaactctcattttttctaaacaaagccctaaacagtaatatcacggatattacaagttttattgttcatatatcgcttacgaagaaagtgattgtccttgctgaagtatcatatttataatggaggaagacctgttacgaaaaatatattcttttctgtaacataaagttagatagatgtttcttggttattctgtatgtaaagtacatagaccatgctgtatacatgaattaaacaaagatacacacatatacagacatgcatatgtagtacagtgggtaatccctgagtctcaaggtggaggattggtactactacatgtacaatggttatttattgagtaacggatcaggttgaaggattttggaaggtaatagccacatcaatctagtttaagagatcattcgttattagacggtatttcaaacgtgatttataaggggttatctcaactaatatattacaatatatatattaattgtataaacgcttacaaactaagcagttgttaattctaatcaagttaatatttaaaaaatcttgttttgttttttttttatcattattttttttggtaaaaacctagcagaggccgtaaatttggtggtgtttttaattatttctgtcatttatctcaataatcagaggtctcttaaataacttttgtcagtaatttattacctatgtcgatctgatgatcgttcaaatgtacatacggtttaaattttgagttttgtctcttttaagtctttggccttgatattaaacgttattaagaaaatatgtatttcagggtttatatttagaattttttacatacaagcagttacatgttaaatactaaaaccttggaacattgtaataaattactcaagaaaagttttgtttttaaatttattagtcaaaatttttgaatagaaaatagaaagactaataaaatccttcaaaactaaaaatgtaaagtgtataatttgtcgaaatacacaggttacatagatgtagataattgatatgacagaaataaaaaaaataatagtgttcaaatcaacagttttattcattaaggaaatatttattaaaatacatatataatattaaaatatatatatatatgttgatcaattgtctatatattgaaaagttttaatatgaataaaacgttgtaacaatagtatgttaatttaaaattttgtaaaatttttcttaatgcaacatgaaatagaaaagatagttaagtatttagatttgtctagtaaataccaatagttatgatttataatattattaaattaggaattcaattctttatgaacaagataaaaaatattcttgaccttgtttttgtgtaaataattgtttatatttttaagaagtgttctctcattcaaatttttaaaatagttgttttacagaaacattaattttttaatggtttttttcaataaataaataattattatacactacaaataatagccataaaaaaattaatataaaatgttcttttaactacagattatgctttttgatagtgttgttaatgtacttattacaaattaaagttttcaatctttttatgcattatataagaataaatagaaatataaagtacaaaaataattatttgtaatatttagaaaaactttataaaattgttttaaataataattattggtttatttctaaccatcagtcaaagttttgatatatatccattcaatcaacatttcaaaaaaataaatactatcaattaatttgaagtacaaatatattgtcttctattaaattatcacatctatcatacaatataagttctatattttgaaaactttcgattatctgtttaaacaaccaataacctatagttcagagttttccattatttctcaatgagctactatacaaatcataatgatatatttttaattattataatgcattgaaaaacctagaaaaaaacccaatttgttgtaatggatgcctggaaaataaagccatgaaagcttattcctttccaaaaaagttttagtatatctttattaaaatatttatttgtttttaaagttaaataaagaagataatatctaaactatacattcacttttaattaacgttcttaaaaaatactttaaaataactgttgttggtataaccctactacaactgataaagttgtgacttgaaagaaatatttcacttaaaagatagaaaaaataatctatttgaaaaaaactgtttaaatcatcatgttaattacataatagaaaaagtgtattcactagactcttcgattataatataacatacaatttttaagttctaacacgcccccctccaaaagaaaaataaaaacaataagcactgacaaaagctgctattgtatgtggttatgaaatagagaatgctctcaatgtttttactctataaaccacaaatttatttaatatccattattattttgatataacattacacagtaattttatcttgctagcttaaataacaattttattacattaatcacaactttcaaataatgagcaaactaattttttttatctttttaactttgaagaagaagtacttacaaactacaattagcagttgtgcaaaactgactatttcttcaacaaaataataaagacttctcttgtttcgaatatgaatatttttaaaagtaaagaaggacattaaaatccccaaatcaacctcaaaattttctttacttcttacctattatttaacttattgaatctttgccatacccttaatttttacaaaaattgtttagaagttgaaaaaggtaagttaagatgatttatattaaagtagactcaatgcaataatctatcactaaataaaaaccaatgatcacacacgggaggagtaaaaaacagtaattccctatttaaactattatttcttttttcaatttagtgtttaggatatatttaaaaatgtaagacgatagataaagtgtttgtaacatgaaatgttgcatattttaatcaaattactttttcacttcttttctcccagtaaatacttagttattaaaatattttttatttgaattgaatatccaatatacttagaaatttctatattagttgtaataaattggttctttaagaataagctttttatcaaaatatttattgattattgcattctttccaaatatatctaaggatggaatagaaaattaactataattattattttcaagagatatattacaaaaataatgaataatcagagtaagtttcgagaattagtgattcctaaaaattttcacaaactttaaaaaagtttaatattttaaataatagatttttttgtttctattatatgcaatagaaaagaaagtgtgttttatttgaccttattatggcaatattattttttctttttacaaaaattatatatatttattgtttcacttttctattattatcgttattatttccttcaattttccattatcttgtggaaagaaaagacctgaaacaatttctaaaatattttatatttccaaggcgagacaatgaaacgttcccaaaaaaaaaaaatgctattaatgtttccataaaaatttctttatcctaaaatagtaatctggactatttatagtagtaaaaaaataaaaattcaaccctaactaaaaggaatgatggaaactcatctacataccatacaaaataaaaacaaaaaaattgttcatataattaaaataacgtttttaaatattatataacttacaaagcttaaagttaaaagggttgaagttaaaaaggttagtgtcattctaataaaagttattgttatgttaaaaacaaatctcttgtaaagatacaaggtattaaccctaaactattgactaaactactctaaataagagtgaaagtatgttgtttagacctagaggaaatttaaaaaaataaaaaagaatacagaaaaactgaaaaaaaagaaaattttccaaatttgtaatgtataataaaaaataataacaacaaaaaacttcattaaaaacggacataacaaatccacaatctgaaaaggctcgcccccaaaacaatgacatttattaccaaccaaaaacaatttgttgaacttgagaatggatatcactaatcttcaaaagctattattctattgttatctattacacaacaatgatatcttttcctttttcagtattttcctgttaatattatcttttgaatatttgtctgagaattgtaaataactataaatatacaaataaacaaaggatatcttttgtgatttgaaagctagtattgtacattttttattacgcgtgccactgtatgtagtcagagtaactttacaaacatcacacctacctacattaaaaatttgagactcaagaaacctataatcttataaaatattcgaaggaataaaatctatgaataactgtttcagcataaacccctttaagattattacactagcaagctactctgataagtagcgaaatatctcttaagagttttgctaactagaacgactacagacatacaagactattgaataatcttagtacataaaaaccttttaacttgccattatcaagatttttcagcgtatgatcaagttcgaaaaactatgccccctaaaacatcctaaaggtagaagtttacaaattgaaaaaaggaagcttgtataatgccaatatataaaatcctaagtaggaaaaagtagtttgaatccttccaattactctagccacttgaaactaatacaacctacctccacatatttcatatagtatagattggataaatgacataataacaaaatatccatgggttgtctttaagcagtcttttttctcctgtaaatccataatgacattatttagaatacagcactgtaactagaaaccttctaacttcttctggaaaaatgataaaaccgaacatatagcaaatagcctaaaaaaatatacattctaaccataataaaacataaatactgtatgcctgaatgtcacatgtataaaataatgataaaagaactctacgctgttgtcacaattagcgccttatgtagtactagtaaaggataaaatgaagcatagtatgtacttgtaccctcctgtgttatttgtaacgcttccaataaatatattcaatctttatcaaactactactatgttttcttaaaaaacttagcaaaattcttatcaggattcaaccaagaaaacttagacttatgaagaattttaagaatttttttaaaaccctttttcaggggcactttttgtcacaagattttttgtgtgaaagattgtccggggataacataactaacaacctttttctcgtatgttagactatatctgtagtttccatacaaggtgatattaaattctcaatttcttgtatttttttgatactaaaaataaggttttttaaagttttgaattattctaatctttcaaaatgtattgtttcccatctctttcagtacaatagctattgttatttttcatttgttttccgataattacttttttccacaattttctaaaattttctttggtagcccctcatgggctaagatatctatttttttttgcctgttttaaaatttcgtaaaaaaattctccattaccaaaaaaggtacaaacaatttcatccaattcaagaaaaaaattatacttttgagtattcaatattcttttattagccatattgcgatcacaatttcgttttcttcctcaatatgtatttttttttttctaatttagttatgtccataaatagttcttgtcatacaaagccctctgaattgcaaatttctttttcatttttgtttattgttactccaacaagtaacttttgtatgtcaaggtaatgttggaaaacctacggcaccttaaaaaaaattaaggacaaaaaattaaaaattaaaaaaaaaacgcagacataacaccgacacaaaaaagatcgggcaggaaacagtattttgattttccccaactaccgcaatcatttggaattagggcttataaaagaacatcttagaaccatccacttgcatgagatcgatatattatagaccagactaacaacaatgtattaaaataactcaatagttattcgttttcgttatgtactttttttttctgtaaatctacaaatcaaggagaaatttgttttgaatacctgtctacaactagtaagtttatatctttttcttagaaactaatggtattaaatacccaccaagtgaataaaaagaaagtattttctaaaaattcacatacaatcacaagaggataattggtagttaattcctcattgtttatctttgtatactaaataatctttgtacaactattgatagattacattatttcgattaaaataatatttttagggtctagtcacgaacaatgcttgaaatatggtaaaaaaacactagggttatattgatttttcaaaaacaatttttttaaagattcaagtttttacaatactttttatgtgaaaatttttagggggacattgctgatagtagtataatatccgaaacactctttcaacgacatttccctccaagaaaattttttcttcaaattcttcggaaaattcatattttcatttttttaatttttctattttgaattttttaaattttattgcttttttttttttccacctctcttagttttttttcttttattttttctgactctttttttaacagcactatgttgggtactattgtatttcctatgcttttttctattgtactcttatggtatattgtataatacaatagctggctaaatttaaagttttttttaatgttattcaaaaaaaattttgtcaattattatctgcatgacaaaattttcgtttttttttttttttttacatttgttttattcaatcttgctccatatgagatctcaatcaaaaaatgatagatggtattaactgtagatatatatcaacccacaaattaaattcaattctgtttctgcaacggaatatgtatatgattccttcaaataagtatgcgtaaaaacttgcttagatagtttatattgttaaatttcgacactacaaatccttctttgaagtcaaattcatgccataagaatctgcacacgttatagatttcgtcaaaaatttctttcctctctgttttctcttctatatttttttacaatttctaatataggagttacaagcatcttagttcgttaaatctttcacttcaagtgcatttggtttgaacattttataagatatcaaaaataaatattaatatatattcaatataaataactttaataataaaacaaatttatttaaatatctattcattatctcgatagcttcctggcttttcattttattttttttgtttaaaattcttctttctaaaacacacatgtacatgagatttcattccaccatactttcatacttaatttaatctttcaaaaatagttatttttatcaaagaaacagacaaaacccatacacaacatacaagaataatatcacaatagaatatttgataaaatgataaatagccaagatatgacaaatgtaaattcaagtgacacaaaagataatcaatcaatttcaaagcgagaagtgcatttacaaggctttaacataactcacgtcgacaccgataacagcgataatacatctaatctagatgatatagcaacaaaattttctccatcacattcattacattacaaagatggagcatgccaatcaaattcaatatatctacaatttttatatagccatgacaaatggccagctaatgttgagagagcatttatctcagctttacgtctaattattaagagtggaacttctaaaacaaagataagaaataggaattatggtcgtaatgaattaatatcgttgtatattaggtttcatacaggggaaattagaactaaaaaacaaatatcttcacatattcaagtttggaaaaaatctattttaaataaactttcaggtaatattactctgactccattagacagtgaagtgttaaatttaattgaaaatggagctgaacaaaatgaaagatcgttaaatttattttatacagtttttaatgaaattattgacgccatgaataatgataaaaattatcaaaaatataaagacacaataatgagaccgttgagaagtaacaataacaatactggcagatccgattataacaacttaaatatgaataatcctaatggtatcaatagtaacaccatatattacaaacaaagtccacaacaacaacaaatgttacaagtatccggacaaccagttctggtgcagaatcagactatcaataatcctcctacttactccattttacaaagtgtccctgttatgtttgtacaggataatttacagcctaatattctaagacctgtcacctatagtgatggttcacttgtcatagcaaatggatcaccaccaccacctcaaacacaacaacgacgggtatggggaaacaacaatgacaacaacaatagtacttattctaataccaccaatagtggcgcttataatatcaattccaacgatacgaccaaaaatgtttttggaaacaattttggaaatgagactaaattatccgggcaatatcagacatatccatataattacgtggaaaaaccttggactataccagccaataacataatatcatcagcttcatctttatcatcatctggatctgccatatcttatccacaatggggtgcaccgtccttatctatcagcaatagtgataaaacagcctcatcaacaacgttatcaaaaacgcatgacttattttctacagcaaataattcattaacgccaatgagatccaaaaatgacaaaagatcactatcaatcgctgatttaaatgatccagacaatattcaaaatccacttacttctactaataattattctccaattattaataatatgagtaatcattatcatcttaaccatgaaaaagttaagctaccaccagtaacagaaaatcaattctttaaagcaaatgataacatgttaaaatcaacagttttgccatctattccatattcttcctatcctatgtttaataatagtaatatcaataatagttccaataatgaaaataataatgaacctgataattttaataactatccaatatcaagatctagtatatcttctgcaactaaagatataagaagagatagtcttactatgaccaataatcctattcaaaaggaatcatattcctccccacatgatattcctaacaacattaatagacgtttctctacaaacgaaaataatgtaacgatacttcctccactttctacatatagatacgcagagaataataacgagtaactatacaaccaataatggagaaaattcgttagtattaaaacaaatcgaagatattgaaaagaagaaacaacaaaaacttcatatgtataattattgaaaactttaaatttcatattatagatatgcagttcttttttactactatttttcttccttttttaatgccaagtcattttttatcccagttatttgatgttatcattttcattaaatttaaccagcgtcacttaaacatttacttgattcaagattgccacataaatgcatagatgcatataagcacacacacacacacacatatatatatatatatatatatatgtatgtatgtatagaatacaccttcgcattagattaccacatgatatatacacgtaagaatatacgcatatagagtataattaaaacaatttcaaactgatgtttctattcttaatcatcatccaaaaaaaataaagtaactagttataattgtggaattattatatttactaaccccacagcttaagcaatcggactccgcaatctgcaactatcaaggaacacttttatgtaaatctttcatcattaaactctaattttacttttgccgtctctttttttttcccaaaaaaaaaacagaaaagaaaaacagagaaaggaaacaaaaatttctgcggtttttagaaaaaaaaagacttttaggtggagttaaaaaatttcaaaaaatagcgtgatattaaaacttttaatgtgtaattctattgtttttgattttaaaaattttagaattatccggtttttctaaaatgatatctttcagagacccattttcttaaaataatcgaaattaacatcaaaataaacaaataggccaataaaaataaatcctagtaaactagaagactaaaaaataattaataatatattacaaataaatgaaaaatatcacagggacaatttctgtttattctggtaattactgaataacatttgatacttgattaagtattttttttttctcaaattcttcttctttaccagcatgtttacacatcatcttctttaaaaaaaacaaactaacgaagttttttgcacttataaaatattttcatgaactatatcatcaaaccatagcgttgtactaacagcttcctatttctgggatgaatgtatatttaaaccaatattattcccaaagttaactacgttattaacgactactgcggtggacgtttttcaagcacttaacaaagcaatatagtaatactcatctgtaccaaataaaataaaataagattttactaaacacttgcactagggaaacatgaactctatttgtacattttacaagaacaactgtaaagttaaatcaacctttattttatcttcctcttttaaaatatttacttctaacccatttattaaacttttctatttcttttaacattatattttttgcaagtaggcttattattatcaattaattcatatttacacaatttaaataataattcttcataaattattccactacactactccatgttacacagtccaaaataattctaaacttcatgcatgcgctccaagagctattaagtttgttaccggatttaatcaaggttttaaagaatgatgttttcattattttaagataaaaattcccattactcgaataaattttcgactagttcaatatatattttgttttggattttcaaaatctctcatggacgattattagttatctttttaagaataacccttgaacatacttgtaaaataatgaaaaaaatttactaaagacttaagtttaaagcatcttaaagaaatacaaatcattgcaaattttttttatatcattacccctactcaaaaacatattaaaattatcaacactttaaatcacaaataatgatatatctatataccccaaaaaaaacatcaaattaagatgttttgttagaattgcttggtctatcttttagacaacatcaaataacaaatctttcataactaggaataataaagatgagaaagttttatgtgataagtacaaccgactacgcaccaaacaaatatactaaaaaacattaaactatctttattatcataaaattatcagtgatagcgatacttattattattgatagtttttctctaccagtcacatttatataacaattttaaaaccgttttatattcgattttattctattatgcttgaatatcaataacatattcctcttatcttaacaaagtagaaccttatctactttgttttccactttatattttaatgtttctatttttatttttctcccaattaaaaaaaaaatgaaaagtgtgtatgagggagaaaggcataagtttaaaaaaacggcaaaatagatggatgacctcttctttttcttaatgacgtcgaacatattcggcaataaatcatgatgattctctgagatacacaataataatatggagtatgcagtaaaaactatgtggatcataaaagtataatgttcttatctatacatatttacttagacatctatgggaatcgaaaaaattagcatacatagatatatacacattgctaacattactattttacaattatggtgaatgcttctcttctatgttatttcaagaaatgtgatttagtcattcaatcataccctcagttcagctttgtcatttgccatttccttctttatttttaaaggagtgctatatttagtattaaaaaacgaaaaaataccaatcaagaaaataatcactgaatacataatattaattgtgttaacacctaagtatcattctgtattattaaaaggtgggtataccttctttgagtttatataaactgaaaaccaaaaaaaaaaaactcaaatcaaatcaaagtaaaacaattaataaaaatatttactaaatctatttaactatacagatcttattccattgggtaatgattaaaatagtatacatattatgttaagggaacatcaaaatgacacagaaaaatcaaattataaatctgcaaaaatgaattcaaatggaaacaataacaatatggatagtcagttttataattatgtttacactgataattgcaatattactacaaacggttatttcacaaacaataataaaaatgagaataagcatatgcataaaattgtatcttgcacattattcccacccatcaataaggaacagtttattccaggaacaaagcaattcataccagtagtgcatgataatataaaataatatactatttttttttgtcataaaagcagtaaaataatttattatcattattaataaaaaggtatacttcacatatatcaggaactaccgaagacaatgcaaatgcaattctattaattagaaaagtcaattcaattttctcttttgccgctgtaacgaataaattctaatatataaacacattcataatatttttatatattctttgtctttttacttaagccctttcatactatctttcttgattctgcctcccccgcccatttactatcataacacaatgagaaacttcagcattttaaaggaattcatatagaatgtaaggatgttacatatatagtaatgtaattttgtttctctctttttttttttcctttttttttttttccctcctgtaaagaaaatttttttgaggatttgagaaattgcgatgaccttttgtcatcaactgcatcgatctaacaaaagttgttaaagaacagaagtttttaaataagttaaaggtaagaaaatagtgaatttgtttgtttctttacaatttgaaattgaataaaacaacagagaaaatttagaaaactgctgtctgtcaatacgttgttcttcaggtgcctaaaaaatcacatttctataaacttattatcattattcaattccaactacattttctcttttaattatcttcttctaatctcactacatttatattcaatatacctatatacaaaatattttcgttgttataaataatggctaaatcattacgtgcaaagagttgtctaaaagctaagtccgtgaaacgtaaagatgaattccaaaatgctgttaatgcacgtgaactaaggatatcagagaaattgaagcaagacttgataaatcaaaagttaaaagaattaaaatcaaaaaatggcacagatggagaaagtaatgaaccagccatggagatagatgatttagctagtttagaaaagaaagaggaaacgaagactcaaaagatcagtacttctggttggagagatgcaagacatcttaattataagagagcaaaaaagatgaaaaaaaataaaaagaaaggttcattcacaagattttaaaatataaatgataaaaacataattactattatctgattattcatatcgctttttttctttcttttttcatatagccttaataatagcatatcaccctagaattcacaataaattattatgtatcatatatacaaatgtccccaattttttacttaataaatatgccacattgtagacaagtattaacacatatacataagtatctagaatatatcaaatcaattgaacatttacaaaagcaaacatagatttaaatactcatatgttatattcatttaattatacatgtatatattggatatttatgatgtgtaagcagtgatcattaattattattattattttttttgtttgtgacaaatccgttatcatacattaactttattaatattagttgaacaagtattattattgtttgaaataactggaagaggaatattaatattactaacagcatttgtattagagtccgaactttgggacaattttctgtttcttttcctttctttccttaatctactttgcatcatagaataagttgaacgtctaattattgtttctaggatagatttatcatagtatggatatttatgtctagttctttcatataattgattaatcagtctttctctttcacactttggtgtatctctaatccatgttttgtgacctaacggatattgcaactcattttcaaagatatcaagtatatacctttctgtcgctaatgcttcatccaatgaatcaactttaaggacctcagctaaggcagccactgataaccttgaatcagcaattttcttacctgtctttggattttgaagctttgaaacatggttattattattattgtagttatgtcttcttattcttttaaccctatccactttagcccaatgattctttttggtgttttcgttgataacattaagaccagctgatttattttcttcttttgttatgtctgtattattaacactatcgttgttagcgatgctagaagtggttatagatatagaactggtggtggtactaggatcattattaaataataaattttcattgatatttttatataaatcattaactttctgtactaattcaggggtagacactactgaagaaaatggtgaaatggtattcacatcactatttttgtcactagccctgttaacggtagtagagttagcttttatatttttgttaaatgttaagggtagagataaagtcaacatagaatcattagaaaaaatagaaccattagataaatcagaagagattctctctgaatagcctgagggcgagtttaaagtattatctgaatttaggtcattaaacatgtagttaatgctatcaaaaatatcatctcccaacaaatttggggtttggtcataggagtaattataattacagttagagtagccatctatacgatcattattatcgttattattgctcatcttagtgttagaattagcagcaatgttattaaaagattgtactgaattagcatttaagaaatagttatctgattctaaaagtggatcttcttgcaggtcttcgaaataatctttacagctagcgtagttgttattgtagtaaagatttgattgttgagtgttctcgaaaaaaaacattttctatttatagatattttaaatggtatggtatggtgtgattatgtatatgaatgtgatgaagaatattgttgtatatttgatatatggtgtttttatataaatcttaaaatctatattagatctcatgttttatatatacatacatatatatatatacaagaaaataaggtagtacacacccacacatacatacgtatatatatatcttggaagatatcaaactctttaaatacccattgacccatcaacccatatttgcacgtagcgataaacctatccacaaatagatatattgtttttctttttgttctattgtttgctcgtgaattaacctccttatgaatgaaagaagaaaaacaaaaaaaagatacacccaacacacttaactacaatattgtggagtaaacaggtttgacgtaatgacacatatctcctcaattgtatgtatgttttgtgattatacagatactagaagataggttctccatccgaataacaaaaaacacatatcctttcttctacctattgttaatgaaaacagtcccacaaatattacgcttcaagtgaaacggttagacactgtttaaaggaagctattaaagcttcttactagtaatagtgctcgtcgttcttatcttaacattctccacacggtggatgctattcattatctacaaaagaaggagaaaaaagaaaagaagaaaaaaaaaagaaggattatattgcgtgggatatcgtaatgttttcccagtaaagaataggtgttttattttcttattactgccgcaatgacaacatcatagttaacattcttgtaatgaaaaaaggtcctatatttttttcttgacactagatctacattttactgaaataggaaaccacgcaggaaactatttctataataagaaaaacaaagcaagaaaaaaaaaacaattatgctaagaacgtctattatgagcggggaattaattttcaataattatattattcgtataagcacggatatcttttctttttttcttttttctttcttacacttctattttcccttacttttttcttaaaaggtcatctacccaccctctctccactttagacaataagaagacacacaggaaaatgcattattaatttataactttttgataatgttaaaaatacactataacaagaccaacatcataacataccatatttatctaaataccagttttagatttttttcaacaatgaaatagagatggaactaaccgtatcaaataaattttttaaaagtaaagaaaaaaggattcatatttttttcttcataatttacaaaatattattcttcataagaaacacaagcactaacatcgttgaaagtgaaaagaattcctccgattataattttattagcatctttttctctttatggcacttctcttacaatatacaaaaaaaagcttaacaatcggagcattaataacttttttttgttcttttattaggcatatagtttttctttttctgttattgtctttagttttcatatacgtaagtttatattaaaaaagttttttccctcttttgttctaagcaaaactttattatgtcttcaaaaaattgactcagttattcttattattgattatatagttttctttatatatataatccgccacccttctatataaaaaaaacaaagaaaagaggagtgggcgataacaataaccgaagaaaatatattaaatttttttttgcttccatcggcccgcccagacatacaatacaatataaatgaaataaaagaaaataaaataaaaaaacaaaaacaaagacaaagacaaagacaaagacaaagacaaaaacaaaaacaaaaacaaaaacaaaaacaaaagaatattttcgaatccatgaaattaaactccgccattcaagtagaaaaataaggccaagaaaaagaaaaaaaataagggggggggggagagggaaaaggaggcgtagaagtaaatatttttaagactttcatttaatcattaaacgctcttttgatacaaacaatcgcatgtgctcatctggaatttctggtcagtcacatatcaaaaagctaataacaaaaataccaggtatttggaaattacgacctacagcctataaatctataatcatttaactattaattgcaaaatcaaaaaaacaagaacattaaaacgtagtatataaacataaagataccatacacacaatcacacacacacaccatatatatatataataataaaagaatgtttttgttcatacctttaatatgtgggatgcaaaattatgattcaaattatgatagtaatcctaaacatcaaggattatattgccccaaatgtcataattttagtgtggtacctgtgaaaagaagagaatttttttccttttatttcatccctttaataccaatacattggggaaaacaattgcgttgttcaatttgtaattggagacaagatttcagatctgaatctgatttacaaagagtggtagatgaacaaaaatattataggaacaatccaatatatacttcacctcaatattgacatatatatatataacctaggtttgttacatccattcattcatcctattttttttctatttttttttatatattcttaaatataatgataactaatataagcacaatacaatttgaatagttatcttttctttcttatatatatgtatgtatgtatgtatgtatataatgtatagtattttatctccatgctggtcttgtttttaatgaaatattacaatttttattagtcgttatatgatcagataatccagatgttgttttagatctaccaaattgaattgtcgatgaattactaccattagaatttttccctatgattttgttattgttttcatccatatcttcatgctttttaatagtcttattacttgttacattattcatggatactgatctagaaaccgtgctttgtttatataatctttcaaatacagatagagattcgcttgaatttgaaatagtgtttcctgtgctctttacccttctaccacttttttcttcaccaaatatttttttatctttattttgaaatgaagagtacatagtagcagttgtattattagatacaatttgcattcttattttttgtggtctaattttagaatttatatcattcattttatccgatcttttcattttattcaatgatgtgatagtaggtctcaaaaaacttggaggttctaagggtttttgtggtttcgttattggcgtattcttaatcttgctattaactatgcttcttgaatcatggttactacgtaatccataaccacttctactattaccaccgttactactagtattaacagtactattattattattgttgttgttgttggataacgaatttcttaaccttaatctacggattctccttgttatatccaagatgggtggtggtgtactcaataaattttgtgtggtcttcaatcttttaattgaattggattgtaattgttcggtttgtaaattttttttcaaaggcgtcttatatatattgccatcaataacattatcatcgttattattaggatttaaaaatttaacacaataatgactatttaaagattccatagtcttgaactgtgaattatgagcaatattgaaacgttcactaaatgtaagatccattaatgattcagtatggtcatcattagacacgaataactgctcaaatttagcatttgttctagaatccaattcgtttaacactgaggatcccaattttttagatacccccaaagtattaattaaatggtcgtgtggattgccattaatgtatacattgccagagttcttctttaattctaaatttgaatgtttcgacaattcttgtatatcatccttgttattagtaccattaaataattcttgttgatccatccattaaactaattatttctttgatttccattaacacctccccatagatatgaccaatttgtattccaagtaaaatatatgtaagaacatacatatgttaatctacgcctatctttgatcaagtcttcgaatatcacattttctttttctttttctttgttttctatttttttttattttatttttattagatttttgactgtgctgtatgggtgttcactaaatcttaactttttcctcttaattgtaaatcaactgattagtaacgaaagtagtagaagaaaagagcataaaccatatatatatcttgttttattttattttattttgttttgtttggtacaatttttattatatctacaaatatatatatatatactacttatataaaagatctctattttatagatggatttggaaaggaatagtagcagatgagataagaaaaagaaacgagttataaaaatagtagaaaagagataggttcagaatgaatagagtaaaataaaaaaaatgaaaaataaaaaaaaaaacaaccacaacaacgagaaagctcaagacagtgggatgttatgttcagtatgtcatatctgcatcttcatttgagttatttgagttactttctctttcattacgtctttcaatttcagtttgtaaattctttagtaacatggtctcagccaatttgatttgtttcatagaattaccgatgatagtgaaggatctacatggttcaccattttcattgaatttttgtgagtggtgtgcagattctgattcatgtttttcgattatgattcttgtttttgtgaattttctcaaattagcgattctattaccttgacgacctaccactgcaccgacgtaagcttcagggataagaacttctagttccgaaatgtctataccgctaccactatggataataccgccattactactgcgaatatcgttgttattgttaagatggtttcttaagtgtgggaagtaacgtttatcagaggaaaaggtaatatcgatgtctttgattaaaatttcgctaatttcaatcaatgtgttggcgacagaaccgggaaacccttggatttccaaaatacgttcacttgagtcaggtaggaaatctcttgaagccacgattttgacaccatgcttatcgatcaatccctttatggtgtgaccgttcttaccaatgatggaggacagatgggaattcaacattatcaatctgagggtaccaatcttgtttaaatcggattgatcgttttcacagatttcattgattgaaggaggaggtaaaatgtgatttaaatagtggaagggatattttttgttattcaaatcaggatcctcgttgatcaaagtcatgacgtcggctaatgcgttggctacattgaccacagtacctgcacaagatagaattctatctgaacaaccttggatcttttcagatataccgattttgacactattatcagtacggatcttatctatggtggaaccttttgtaccgataattttggcagcttcaggtagagataaaaggactctatggttcactgcagattgcatagcaattaaggaatcatttggtgctgtgccgttgtttatgaatgtactcatttctatatttctttatttttttttttttaattttttttattaatgttaattctgctgccgctgctgctgttgttgttgttaagatggatactagttctattaatttttcttgggcttctccttttgctctaggacttcttttttttttgttttttctttctttcttcatcttcctatctctctcttttttaacaaacacacatacacacactcaataaacactttctctgcttttttctttatttttatcaattctctagattactaaaagttgctaaagaaaagaaaaagatctaaacaaagtattagtagatggaattggacaagacaagacaagacaagaattaaagaagaattcgaggtaaacaaaaaagaaaaaaagaaggggagaggaggagaataaaaaagaaaaaagaaaaacgaaaaacaacatacaaaataaacggaattgagtattacagagaaacgccttttatttttttggttaaatgcaaaacaaaaacaaaaacaaaattttttttttctctttttcttcacgtctctccccaccaaaaaattcaactccagaaagacagaaaaacaaaaaacaagcaagcgagaaaaatctaaaaaaaaaaaaagaaagaaagaaagacgggttgaataaagaaaaaaaaatgcagtttagtctttccttctctcgtcaagtatatcaagaatcaagagaaagaggaagaacaaatagaaaaataaatagaatactatggtaggatctgaggttaaaaataaaaaataaaaataaaatgaacgaattatttcattatatatattaccctctccattttttttttctttttttacaaagtagtcctatgttaaataggcaagtaaaaatcagtaaatgtttttatgatttctatcaactcaactacctttttctttttcttcttctttattttttttttcttttcatttcacgatacagtggattctagcaaagaaaaaggctaggaagcaaagttacaattcccctctttcaactttaaaatgttcaaagagatatattaccattaccttcgttcatcgtctcatacacacatacaccagtatagtttgagaggtgggaaaagggaaaatagtgatggttgcaaacaaatgcatggatctacgtcaaaatcaacctacactacttgtatgtagaaaaaaaataaatgatagaaaggaagtaatagagaggaaggaagaaagaagtgacaacagtatatgattctctctacttttaataatatgattgatcgaaaagaaaaccccttgaacgtataacctcttgcttactcatcaaatacaaacaagaaaacaaaaaacaaacaaaagaaaaatacaaaaactcttccacggacacccatacacccatacacagataaacaagcatagtgtaattaaacaacaaatacaatatcctcgccactgttgcttgtgattcttttttttttttattttgttttgcattttactcacccgtcaaagatgacatcgaaagagagagagagagaaaaaaaaaagtggaaaaaaacaaaaagaaatggacgaggcaagaatgcttacttgataagaataacaatgatattaataataataataattaacgatgataataatggtagcccatttatcactttatcgctccgttaattactaatttattaactcttgactgatgacaaatcattattactttataatatttactcaacttgtttcttttttttttttccctttctttctcttcttttttttttttgtttttagtaatttatcactaagatttcaataaattcattacaaacttatcaatttcttttttttcatatagtgtttctttctttctttttgtttttttttaatatattgccttgtcttttgatatatatatatatgtgtacaatacaaaggaatagcactaattaattgatccaaattttacttgtttgatcccttactagcagcactcaaacaaactaacaagagcaaacgaaaatcctcattcccaatacccctatctttaacactacacattaataagcacaatagataagtgtgtgatatagcataagactgttaagaataacttgatagacactcacacgcatacatacacacacacaatatatatatatatatttatctacctgtattaattagaaatgactactactatagatctacccgaagtcttttgtgtggcaagagcaagaataccaactacacaaggtccagacattttcttacatttatattcaaataataaggacaataaagaacatctagccatcgtattcggcgaagatataaggtctcgttcccttttcaaaagaagatcacctaatgagtctcaacaagatagaatgattagaggtgcctacatagggaaattgtatcccggcagagcctctgcagatgtggatgataaattaggcctggaattaaattttgacccagttacaggcgaccttatattcgattcagaaacgacatgggatgggacccataatgacacactggtcagaatccatagtgaatgttacacaggtgaaaacgcatggtcggcacgttgcgactgtggtgaacaattcgatcgtgccgggaaattgatagcttgtgatcatgaaccagaaacaggaatagtcggtggcaatggtcatggtgtgatagtgtatctcagacaggaaggccgtgggattggtcttggcgagaagttgaaagcttacaatttacaggatctaggtgcagacactgttcaggcaaatgtgttattaaatcatcctattgatgctcgtgacttctctataggtaaatctatcctattggatctaggccttaagaacgttagactgttgactaataacccagataagattgcacaggtggagcatgctgacttacttcattgtgtggaaagagtacccatggtcccaatccactggcaggatgaagccagaggtattgattccaaggaaattgaaggttatctaaggacaaagatcgagagaatgggccatcttttacaaaaacctctacatttacatacaaatacttcaaaaagagactctaccgcaattgtatagcgaaatatatatatatatatatttctttagaactaatgaaaaatgaacaaaaaaaatatatattcatggtcttttactatcattatatactttcccatctcaccctttgttttcggtatcaatagcatttaattgtttgattcaaatatatatatatactccccacggaaactaatgaaaataaagcaatttctttccttattttttttttttaaattcatagagagcaaagggtggagaaaaataatatcattaaacattcatgtataaaaaatctcaaaatattagtgcatgtgtcatgtaaaaaaaaaaacaaatcacatgttttctgtttaatactatgtacttataaattcactgaaactgaaagaaaaaaaaaagcatatagataattaaaagagagattctgtaaagatttaggaagatagttatacattgactgttcttagtacgaaagttctgaaaattaattttctatagctttgtttatagtcattattatattgtcatttttactatctattctatggccttgtttcctagtattgggtagtaaaacaacattgtaatgatgacattttgaataattaataaaatctttgtattcttcaactgaagacctttttttctccttttaaaaagattgtttcaagatgacaaatttgcaaagctatactcaagactaaattatattacaaaatccattgatgtgacatgcatctgccttctcgtaattactagtgtcaccaacaaataaaaaaaaaatatttcactaggtaatgattatttaattttttttttttggttagtcattttgtttttaatttttggttctctttgtatatctgtggattactaagctacacaccctaatgcagtaataaattggttattaaattttttggaaaaaaaaaaaaagaaaaacaagttattatcctataaaatatataaaccctaaatacaatttcacattaataaaaatagaaaatgtgaaccctagttgtataaagcaattatagttgtgaaactattataaccctacggtatttcatttctatattatttttttaatagacactatagctagtgtacacaaaaaaaaaaagaagaagagatagctggaaatattgtttagaataaaatactaagacaagcttaatctactcttatgaatatctaatagtcaccaatatccttttgtacgtcacaggattaagaattaagatacgtttacaattttggttgactaaaatataaaacaaagcaaaacaaaacaacattatattctctttttctttttcgtttttttttttttttgagtggtggactttcataaagtaaatattcgatgtcagatctaaatcattcaagtaataatcctaatattaataatgacagtaggaatattttcaccacagttaatgataatatcgataactccactataaatagaacaaaaaatcaattctttgacatttatgaaaagatatccagtgagaatttaaccgtaatagataaactaaatattttgacaagattcaaaggtcatgttaaaaaagaattagtaaacactgattatatacaattgtattttaaaacactattatacattcctaactatattaaattgttgaatcagaaacaatcctataaagatgatcaagaggaaaccataaagaatcttcttctgacatcgcactctgcattatcttatttagttaaaagagtatcatatcaatctccaaattctatcaataatactatagttaatgatttattatcttattttattgaaattcaagatactgtaaataatcaaagcatcaacatagcgaaatttaatttaaataaaaaaatatggttattgtcaaataaggctattgaaatcctttatttaaccgttccattatatgtagaggatgctttattgaaactttttaacaatttaaatgaatctgataattacttattagaacagttaaacaataatcatttgaaatatttattattaattattgatgatttaactaggataaatttacaaagtaataaaactagtagtaatacaacaatttttttagagatttttttacctcatttcatccatctattgaataataacaaactttttgatcttaatggtacatatcgtgaagatacaaacaaaaaattgattgtggaattaattaatgatatcctaactaaatatctagataacaaggtattttctgaattcaaatctaaattgaataacagtagcataagaaactattttatgaaagaaacaactacagataaatcttcagatacaggaaaaaataaagataacaataacattgataataatgatgagaaaatatcgatcgataataatgctacttcgatcccttcacttggtttgtttgatttggaaatggagtataatatgttgctaaatgattataaagcgccgcagttgaccaatttacttaaccaaaaccatttaaaatataaatctaaatatgaaaacctaacaaccttagtgaacgatttaaacacgttattggttccatttcatgaaagaaaggaaactgaatctaattggaaggttagacaaacgaatattattatgataagagagaagctattaattaacgaacaactgctcaaaaataataaaagtgaaatggtttccgctttaaaagaaatgaatttcgttgataatttatcaaaagctattttatctttaagaacatcattatctttaaactcgtgtcaattattaaaagaactattagaattactaggtgattctatgccattagtattgctggatcaaatattcacattattaaaacagcttttatcttcaacaaaaaaaatatcttcacagatggcattgcattgtttgatgtgttttttcatatgtgttaatgaattccacaacaaactgtttcaaagtgcattcactttaatgaatgaaaagagcattgttccaagaaattcttcgacaatttttcttagaattttcattattaagtttagtaaaactgtgaaattagagaacaatttattatatgtagaagagtggttgaaaaaaggtttattagatgcccaaataattgtcagagattcgatgaagttaactttttggtatttttataaggcataccctgaacatgggaaatctttattacataatttcttttccccacaattgaaaaaatctttagaatcatctatacctttgcatctatccattgattatgaaaggccatcaaacagctcttcttcgaataattcaagacgctcaagtttgctaaatgcacattttcaaaacaacggaagtaagaggaaatatccaagttatgcacaaccgacacagtcgtcatccatcttgcaaaaaatcaacaatgtaactcatggaagtagtaatggaaattttggctatagatcaactagtgataatattagtcattcgaatgactttgtttccaaaaaatttaaatctagcacatcaacaatgagtagaattgataataattcattgataaaaagaaaagttagtgcgccagtgaggcatactggtagtaataatagtatattagacgttgagaacatgagtcaatttgatataactgatgagataaatagtccacattccaatccacttatccaaaaatatttggagaattctaattctaaacaaaatacatcttctacaattaataaaactcctcttgataataaatatggccttataggatcagaagaagaatcaaaaaaaattattgcttcatttaaatctcattcgttacaaaattttatactgaaccctcaaaattacaaatatcccttgcaattattgcaaaattttcttttacgtaaatctggtaagctcctgatagagacgactctatccacaattatgccatatatgagacaaatcttattaaaggttccgatcgagttgaaaaatctactttcatttcctgtgtttgtgcagtgtatgccattaaaattcataattgaactatgttccatttgtaatatgaatattgatgacataattttaaaattgaatataagtgatatgaataaattcataaatgaaataagttctcttttcaatgatatgacatctgaatactctgataaaaatgtctctctatattatatgaagtacagagaaaaattttttaattttacaatgaatgtattgatctacttatttgaagataaaattcattttgatatccaggatcctgattttaaaaggttattgaagttggtatctgatatttatggagatgagtttgataataccatttatttcaatttaatatttcaactttatatatacaataaaaaagtattcttagaatatttgaatactctcaatctggtttccaagaaacttaaaatttcaaatgaattacaaatgcgagatccgacattcgaactaacaagcaccaggctatcaaaatccgtcaaagaaaaacaaataactacagaagtggaagataattcatctcaagatgttttggctatagataatcataatgatgatattaccataagaaagtacatggatatgaccatggtaaatccatttaagcaaaataactcccttaatggagaagtaaatcaaaatgatgaccttggaaataaaataaaacctgaagatagtgagaatggtacatcacatagtacgttagatagtacagaaaataaattatctcagatgactagagttgttagtgtttaccagactattgattacacaaagtctaatcctaaaccactaaataatattaaggaagaggaggatggagataaaaatgctattaaatcagaaatcgatctaagtgatattttctcaaagaaaaaatctgtaaatgagttgaatatgatggtcagaggagtcaatcaagtagaaaataataaattagataatatcaatttacgtaatgaggaggatttcaaaccggagcaggaacatacagttaaatttagtactgatccaccaaaagtgatcaatgatgaaatgaagaccttgagaaaggaaaacgaagacggtacattaacttctagcccagagatagaggtcagatcaccagatgttaattcaaaattagttttagtgtctaacaattcagaaaaaatacagccgagaattaaattagaggaacaattagagataccaagggatgtaactgttcatcatggagataaatataatttaatgcatttgttgcctgcagattcatttattttatttgaattaaatgtaattattgcaagtaattatggacagacacgtgatttcacaattaagaagcgtaatcaatatgatcatcttctggaggcagtgaataggataaaaagtggtatgtttaccatgaaacatttgatttatttaattgaacctttaattgagttagatctgaatgataccttattgcttaaatggttacaacaagagggtggatttgcaaagttacaagatatttgtttaatgttactacagtctactgatgaaacgatgttgattccaacgaacatgacaagtaaagcattgatattactacagtgtttattgttaataaatgaacatttttcagataagatgcaattatcatctgggtttgctacagagatatgggatcagtttattatattggttgataaattatctgattataataatgaaatttataatcttttgatagagacaaggcagttgatgatacatttaaaatattttgattctaaaagaataacaagcattctgaataaattattgtttatgatatatgaatatgaaaagaatgtgccttctaattccaacaattataatccacagcaattagtatatgtttcaacaaagaagaaggaaggtatggtggtatcatttctattagggacattatcagatatactcaaagattataggagacagaagaatccaaataatactgttgttattaaaaataaccagttttctgaaattatacaatcattaatatcatttacagaatttgagataactgaatggagatatgagagttgcaatatacttgcaagcatccactatattctaaagactattaagaaattacgtcaagaagagatagaaggtctatttggtcaactaagtaaattttcttatagattgattaagtccatggcatcaagtatttagaatattttctaaatacgaggttttaactctttatcattataagcatatatacatatatatatatacatgtgtgtgtgacacaaaagaggcatacaaataaagtgtattgatctgcattcaactattatattatgataaatattaatcatatattctctgtacgtcaatttgtcgatggtcgctattactgtcaggcattttaaaaaaatgcaaaaaaaaaaaaaataaaaaagtttagtgtgacgtggcaagaatctattttttcccagtttttgggttccttctttttaaagtaaaattggttctatggaatggacaccaggaaagtttgcatggcatatctaacccactgaaaacagtctatagtttgagacatttttttgagaagacatagtacaaaaacaacacatataatatcagtgattaacattttcaatcgtatgttgtttgttcaacacaacttctctgggtgagaagtttacttgactacattattttaaaacactatttctgaataccacttcagttttttctatatgtagttttatgtaatatcttttattttactcttttgggttaagataaaacggagcttaaaatgaataagttctctcttttctcctttatttttttttgttctctccccacaaaagatataaagaaagtatgtagtgagaaaaataaaaagacatattgtttaaaaatataaaaaataaaattgccttttatatattgctttatttgtccccaagaataatgtggttggttacaataactatatactttttctgtagataacgaatcattcgatagtaataatattatcgatagctatctcatcgataatattaatgaagagaggtatgaagttgaaaagttgaccagaactattggctattaatgtatcagttgatgatgttgcttgtttgtttttacttatttagttagctacacagataaaatgatagcattgtatgttttattctattcattttttttcatttatttctcactctttatcacctgaaaaaaagaaaagaaaaagatttcgtgaaatattatccattttccctttttggcaatactggaagaactccataactaaaaaaaaggaaaaaaataacacattcgccctttttttttggcgtttctttttttttttttttggaaatcttttctttttccaattttcgatcgaaggatatcatacaattagaacatatgctgattatggaattggagtctacgtgttttagctgctaattgggtggattctttattgatctataaactataagttgaagactaaggtttatgcataaccttttagacttttatctacctttattatttttttttcagatctgatgtagaaagtgctccatcaaccagagaaaacacaatgactactaatgatgaacttattcaatattttggaccagaagtatctaaaccagaaataacttctgcactaaataatctacttaggttgtatgcaatcacagttgaagaattatttataaaatgggaacaattctcccagaatgagagacatgaaaatcaaactgccctgaccgtagccaatattgatcaatttaaaaaatttttgcaagctaaaatagaaaaatatgctaactcagtgggtgatcgttcttttaatggtggtttaaacaatgatagtgtgtcatcttctataaacaaaaaaattaggcctgttagagtaccaaatagtagtaatggttcaatgtttgggtttagtttacagaaatcgcctatggtcactaaaaaacgtaaggtagaagtaaaaatagaacatgataaaagtagccaattagattttaaaagtgaaggcgataattcttttaattacgacacagaagtgaaaagtgaatcctcggttcaactatcttccacaccaagtacaccttttatgtcaaattcaaaatcgtctaatgttgtttcaggaagtattcttgattcattaaatccccaaaatatggaaatttcccaagggttgctcattccaggggagaatccaaaacagcacataaagattcaaccttattacgacccatcaaagtataaattcagaacgatgagacaaaaactggtagatgtatcggatgtactagatgagcaaattgaaattgcaaccaaattaatacaagaccattataaaatttcacctacaagctttggtgatcctacaattcagtcgcaaaatgaagtatatgctgtgggtagaattgttccagattctccaacagcagatggatttctaaatattcagtctttatcactagaaacatctcggattggcggtgtgggaagaaggataaggcttaattttgataatatagaagaagtatctttatttgctggacaactcgtagcatttaaaggaaagaatgctaatggggatcttttttcagtcaaagaagtcttaaatcttccttacccagatgctcctgtgtctatagaagaagatattattaattataaagaattgttagataacaattcatctaaaattgttattacttcagggccatatatagcggaaaactcttttgatttatctcaccttataaattttgttgaaaggataaacaccgatgtgagaccacacgttctaataatgtttggcccatttattgatgttacaaatgccatggtgatgaacggtaccatccccgaatttcctgaattgaaaaatcagccaagaactttagatgaattatttacaaaacttattgtacccatattgaaaatgattgatccagcaattcaagttatattgatcccttctacaagggatgtaatctctaatcatgcatcatatccacaggattcttttgatagaaagtcattgcaattacctaaaaattttaaatgtttcactaatccatcaacttttcaattaaacgaaatatattttggatgttcaaatgttgatatatttaaagatatgaaagagataattaagggtgggaatacatctatgcgtaatagatttgatagaattgctgaacacatacttcaacagcgtagattttatccgttgttcccaggtgcgatccgaaagataactataccttcggaggatagaaaagtatatagacatatatctggtgcagatttagaagtatcctatctaggtttaactgaatttgttggtaatactgcaccagatgtggttattataccaagtgaaatgaatccttttgctagaatcattaagaatgttttgtttatcaatcctggaaggttcatcaaggctagaggtgcaaaaggcacttatgctcaaatatctacatcatgcccttcgacagaaggagatagccttactcgattagatggagatgagatgttatatttgcataatgcatggaaacgttcaagagttgatattgtgaccagttaagggttcgtaagtatatgattcaaaagaaaaagacaacaaattatttaaataataatatatagagaaaaaaagatttgggcatcttaatatataattataacttgattttaattttcttaactaattgtttgattggagaagaactatgtaaatttttagtattactatttcctatcctttgagggaaggagtcgtttgtggcatcgcttgattgttgagttaaaaaagatttccttgaaactattgatctttttctgagagaaagtgaccttctaatattagaaatattttctaatggttcaacttttgtgtttttgttttcctcgtcacgtttgttagatagttgtaatggggtaactggtacatcttctctttctgctttaataactgttgctgctgctttagttgcaaggtccttattgttatggataacagatacatcatgttgttttgggtataccttcactggatttttcagggtttcttcctcgttttcaaaaatatttttatcgtatattgcagtcttagtttgttgatggtgaggatctctaagaggtagactaatcgtcatggatagtgtatttgtgtcattatttatagttcttgttattgcattgtctctcttattacttttcagatgataattatttgatattgaaaattgatcaggtagagttgcactaacaacgccctcataaagatctttttcaggtgtgtctggtgttttatttggaatacgataggtatttattattctcggactagttattattttagtgaattttggtgatgatcgagtttttttattatgtgtaatttctgacagtatatggctgttgggagtatgttgtacgtattttctaggcgatatctgaggcgtcgattcagtaaatttaaaaatatcctctgtgatatttgcctctttctcatttgatgaagtgttatttttgtgatttattccattcttttttaagatcttaattttcatgctcttcatttcatttgtaatttcttgcatataattattagtttgcattacaatatctaataaattagtttttttcggtagttgtgatgtgctaataataggaatatgcccaactttcggagtttcttgcaatgacactaaaagtttgtaaaaaaggtaataaacaagcaacgaaaggtgttctaaaaatatactaaatctcaaaattgtgctccagttgtacttgaaggggtaccaacaattccattcatcttttgtcaatcttatgttattcttcttagtatttgccaagtcagaattagaatatatcagagttaaagtaggagaaataactgatgatataattaaaattatttccattatgatattccaagaatcggatgtagatgcagatcctttgaagtcatcttctaattcagaagtttctgtaatattgggaaaagagactggactatatttttttattgatctccacaaatctaatttaaaagtaattagattgaaagttaataagataaagggtaccagtggccaaataatagaaaacatagagatataaccaaactgaagtactaactttttcatattttcattataatcaaatgacccccaatcgttttgttgaagggaatttatataatcccatgttttaaggtccttcttgaaatgagtttcaatataatgtcttaattttgggtatatattatgagaagtatcttgagctgtatctgcagatattctatttgcgttagttttgaagatatggattcctattggaagaagattttctatagcaatagaaataatttggttagtgacagtataatatagaatttgatctttagaccttttaatattcataaagaattcatttgatactgttggctctatacgaaaaatgttgaagtaggaagttgttttattttgagtcacctcagtagtaaaaacataaccataaggtatgtataagaatagagtgatgattaatggggcataactagtaaaaaaggtgataacaaagtctttttcgattattgatccatttgggttagaactattctcccatttgacaaatttctcaattaaggcttttttatatatttttgttaataatgttgtaagaagataattcagtagagatggaaatagtagaagtgaattaattgtcaaggagtcaggaaataattgagttatgaaaacttcaacctttaaacacagcaactgaataaaaattgaaagaattataaatattatggcaattggaataaaacagcatttctttaaaatcactttgtaatgttcgtcgtgtttcttttttccattgccagattgaaatagagtcaccttataaatgccttcaaataaaaacacgtaatgttttcttgacttatagatccaagtagagataaacatgatggaccaaaagaataataaaaatgtgtatagtttattgaattcccaagagggtttacttcggaatgctatacgaacaaatataccaattattgaaagaggtatcaaccaatgaatataatatttaaaataagcaaaataaagagattgattagaatttccagaaagcaaagctaattctactaattccttttctgtaggaagactaaagggtatcctttgcatggaatttttatacagtttgtctaaccttttcaaagtcctcttatcgtatataggaaaatgtgttatgataaaaggtaaatcttgtgagagtgaatagatatagtcatttttgattttctctacatctactctagtgaagacgaaaacactcttagcatcagggcccggtctagtcactgcatctagtcctcttattgatagttctgctaataattgtgctaaattatcttttgaatagttgaatataataacataattgggatctaggtggtctaaacttttgttattatgtgacatgctatgacaatgaattctgatgtctatttaaaaagtttgattaacaaaaataatattgatgtggttggttcccagatataattatttgctggtgtaaataataataaaaatgatagtatgtttgggaatttcagatattttatgacgtaaataaaaaatatttaaatacaaatggaatatatacatatatgtttgtatgtatatgtatgtatagtcatattctatatcatttttgcttaattaacaaatcgtagtaggcaataataattagcgtgttatgttacacttatataatatatctaattattaaagattgcttctgttattgacctttattttcgccctttatttcaaagaatatgtacgagatttaaaagaaggggggcattcattgaaaattgtccggtaagggttaaatgaacctttaacactattttataccctgatctaattcctcttgatattcattgaggccgttaccctttaacaaaatcattggtttacagtcatcatgaaaatatgagatacaattaatacttgtatatgagaatctatacaattgcatatatgtacatgttgttataacatatgtagagactatatataattagtttgagataatccatcttaaacaatctactacataggtggctaaaggacctgcgagagtcgtcttacatgtaatattcactgtataatcttgttgacactgcaatttcattaaacaaccaaaattgccatctgtcttggtatgaacgatgctagcaacaaaaagtgtattggatacattggtttgttcgattatgttcataccaattcttttcaatcttgtttgtaagattgtaagcattgattctatggagttatgtctttcttgagtttcatttgtattgaccattaatatgtttgccacatgacactctgcctcctttccgagagctgttcctaaagttctccaacgtgtaataaattggggcaatgtaacacttgtaatggtgtttgagtttaatttctcactgtttatagtggagattattgctatacctaattttaatgtagtatgattcgaagtactaccgcaattaaaatatacgttcattaagggacatttttctatattaaagggttttcttatgacaacctgaacattctgttctgttcttttgtgtggcttaatatttgaacttgttaaagcttctatattttggaagatatattcaggattgttttcgatatgagcagcaatgaattcagtagatagacctgtgatatcccattcagtttggttaatatatgtgaaacctatctttatctgatatggttcgatatgtgttatacgatataatatttttattaaaggtgaagaatagaaaataccttgtttatgttgaagcattctagtaaatccttctttccaagtggaagtcaacatttgttgaatgtacctattatttaatcctttagcattggtattattgttattctcttgaattggaagtggtagtctattattttttgcagtcctactttttattgaaagtggtactaatggtggctgttgcatgcttatattgtttggaactgagttaaatgggcctatattttctgcatcttttgaagaatcgtctgaagatattttattggatattgttaattttgaaaattctatatcactatcattcgaatgattgtcctgttgtaatccacccaatcttttcaataatggatttgatttagtattgaatgagggcatggtttcaaataatgtattgatcaaagtcatattaccagacattttagaaatttggattatctttaaatattcatatgctcttgtttgtaattcgatatctaatgaatttaattccagttgaaaaaatttgattactttggatccaactaaattaggttcaaatttatatagttgtatcatagtggtcaaaatcatggcttttgtcatattgaatacactgtaatatttttcagcaaagattgaaaataaattgtctattgatatctgctttactattaaggaaggatattggcctaacaaaaaggcagccgtctttacgatatattctgaagtatgtcttttgactaaatatccaagcagattatgacaggtcagctttcttaattgaggattatttactacaatctgacataatctataccacagctcattattatcatttaaatgattatggatgttgtcatgatgaaatgaattatcaggagttaatgataagattttcaaagaggtttcgatataccaatttggatctgttgcaaatttttctatcaatactgctattttaaccgagacattcgattttacttgtggatcagaactttgtttcatatttgagataaaattcaagtaatgggctactataactttcacagtatctacatttgctaaaatatataacaaatcgatggtttttctcaatatggacatatccctttcgttattcattaagtggacaattaaatctaaattctcattacttacagtatcaacagctacccttccactatctgaacataattggatcaatgaatccagagtcaaatatctgatgttaatctcagaggatcgtaacaataaacaaagagtgttaactgaattgattattgcttcattagatggatccaatttaggtgcaaatttaattagggagaataatacagtattttgtacaattctttctattggatcactactttttctgtggcctaaagaaattgcatctactacacattttcttaatttatttaaagtttctgggtctagatctgaagggtgtaaacattgcttattcatattacgtggaggatcaatctcttgatatgggggtgctatcaatttgcttaaaagggaaactactttagttattagccaagggtttggtatattagcaaatttgtattctatggggaatctatatatccctgagtcttttgtacccaaaacaacgcatgtatataaaatatctgttaattgagggacaatcctgaaacaatatgaggggtcgatatttgaagcgatatactctactaagggtaatgcagttagagtgaccctataattatctgtgtcgtctaacaaggcaatgatcttctggatccaaatttgtttcctttggaaattgtctgttaatatagataaattattttttaataaagataagaacgttaaggttgattttttcttcaaatactgtgatgaggttggagatctaatgatttggaacacactatttacaatttcttcgttggatgctagattggagtgtagattacctacagtcccaataaaatttaaagccaaagaggtgaaatcatctttatttgctgagagatcagagagtagtctttgtaagaaccttgtgtggttgattagtgtgattatcctttcatgttcgaagaaaagtgatagtattagataacccatgaatttttcagaataatgattcgaatctataagattaagtatttggtctaatccaaacaacaattcatttaattttgaagtatttgtggtgatatagatataagccaacttagctacatatttttttctttggtatccgtctaatttaagtgaagtagtagtggcagtggcggtggtgctagaaggagaagaagaagaaggatctgatagattggcatatggttcgaattgtttctttattttaactaattcataattaattcttttttcgtgatcctgtgaatgttgggtggttctgagatctgctatgaaaagttgtaaacctttaattgtattcttggtcgatccaattgggttttccataaaagacttctttttgtctatattcattttggatccaataaacccatgtaactaacgcagttgcttagttagagacaacaattccagtggtattatagcctagtatttaagcttttctttctgggaagatatttcgacagataagtattttgtggtcactttcacattgtatccaatggaaagtaagaaatacacatgcatacacatatacacagtgctctttctttgttgctccttcattactttcaaatcagcaaagttctacaaagcagatttatccagacccagacacccaggcgtcctaatttggaaaatacagagagatcatttaaagaggggacaccactattattatccacatgaatatatatatttgtgggtgtgggtgtgggtgtgtacagataggtttattataaaagtcgattcataagcaatgttaataatgatttaagtggcaagttaaaagatataaacactttctctctttttatatatatcgttagatgtaatatttagaaatgcaattacacatgctattattaactaagtgatatatacaccacagaccggtttatctattattggttactcttgtttacactacttgtttcacctgtatttctctggcgtgctttctgtgtttctctgttgttattactgttattactgttataatttatataattgttattcttattatcatttattcttattataagtaaattttgtgaaaaatagaaaagaaaaaaatgaaaggaaaatggaaagacatttcctcgaggaaaataagtgaaatgtaagttagtgaaaatttttgataatcttttgatgagccaacacaacatagctttgtgctttttaatatttgatctgcacgattttttgaactcaggttaaagagagctgttagagagttaaagcaacaagatcaggatcaacaaaagaaaaaaaaaaaaaaagaaagaaggaaaatcaatatgtctctatgggtagataaatatagaccaaagactctacaatctctgtcacattctgatgagctaactgaattattagaatcactatctaaacaaccaagagatttgcctcatcttcttttatatgggcccaatggtagtggtaagaaaactagatgtatgtctctgttggaatctatctttggttcaggtgtatatcgacttaagatcgatgttaggcaatttgtgacaccatcaaacagaaaattggaattgaacgtagtaagttctccataccatctggagattactccaagtgatatgggtaacaacgatagaattgtggttcaagaattattgaaagaagtggcacaaatggaacaagtcgatttctctgattcaaaagagggtggattggcacacagatataagtgtgttattatcaatgaagcagactcattgactagagatgcacaggccgcattaagacgtacaatggaaaaatattctagaaatattagattgattatggtctgtgattctctgtcttctatcattgcacccataaagtcccgttgtcttttgattcgttgcccatccccaggtaatgatgagatggtgaaaattttgtctgatgtcgtgtctaaagaaaatattaaactagaatccggctcgatattaaaccagatctcgaaggaagctaatggaaatttaagattggctttattaatgttggaatccatggctttgagtaacgaattacaactgaaagtttctactcatataattaaaccagattggatagtagtaataaataaattggcaagaaaaatccaaatggagagaacagtaggttgtcttgtggaatgtagatctattttatatgaattgatggcacattgtatccctccaaatacaatattgcaagaattaacgtttgcattattaaaatcaaatgcaatcgcagataaacaaaaggggaggataattgaacatgctagtgtatttgacgagagattgtcactgggtaataaggctatcttccatttggaagggttcatcgctaaagttatgtgttctttaaataatgattaaggtaacaagagtgagaataagaatataaataaacaaagaagaaaggaagagatatactggaatgagaataaatacaagaaaaagtggatgtttatgaaactgtaaatctatactgagagggagaggtcagggaaaagaagaggggtgacacatagagaagtcaaatgtttatatgcgtgtatttattaaatatctacaagaggtttgctattattatatagaatatatagactatttttttctttatttatttgcttaatgatttggcatattacattgtgtcttgtctatgcgcgtttttattgaaagaaatcttttttttagtatctctaatcatcattatatcgtcgtttatgtctagattaataaatataggaaagtcaagaacatgaagcaacgaaatactatattaacgacctctataaagaagatattcaggttcttttgatttttcaatacttattaatttctttctagttctttgggataaagaacctgggactattattttttccctctttacggtttctaaatctttaaaagtatgtaaaccgattcttactggggcttctcttgtaacaaactcatagacacctggtagtttagtaccagctttgcggaatgcttctctagcaactctttcgtgaagattgtcaccgtctatttcaaagattattttaccagtaggaacccttgtcatccaatgatcaaatgcacctttacctttgcccattctagtctcattacctttaatacagacagcaatatctgtcacgaggcgtctccataaccgaccgttacttagaggcctaacatatctcataatagcattatcagcctcttttaactgaatagcagtcaaacgcacaccttcggattttaatcgaagtccatatttaccaaattgtaaagtggagcctttgacagatccacctgtccttactggaactctacctttttgtttcttactttgatagttgaatcttggagcatattcgtgctttctacgggcaatatttctaattgatagagatattctacctaattgaactttttgagaatcaaataacattatttatattattacagatatgtgtgggtgtatgtatatctttgttaaaaatttaatcactttctctttaatactttttcctgtctacttttctgttaaatttgattaatgcattaacgacataaacatactcttggaaggaaagtgagttgggagatgatactgcttttaactcaactctatattctgtaaaacttctgttaaacaaaacctcttcttctttttctccctttcttagtctattttattcttctttttttttttcactttcagattttctttttcggttcttttatttctttgagggatctgataaccagtggtttctcccctattgtcttttccctcgagggatcttattttaaaaccaatggatgaaataaagtaagaagtcagagcaatactgatattgatgtacagagaagtaaggtggataaacaatgccttcagaacctttgagtgatattttgaaaaggtgaaattaataattttagaactaaactgaggactatcaaaatataggaaaaaaaaatagaataatagtgcagaagggataaaaataatccataataatccataataatccataatgaaattgaacaaggttgatctagtaaaccaaagttttactcatctgattagacgatataaattgactgcattcactccaattagaaggcctttgcctaaaactttagagattgatggtaaaacatataatacacattctgattttactaatgtaactccaaccataacatcccacttaagtagacaattacatcttaacaaggatcatcctatcggtatattgagggaattgatcgaaaagaaattaaattctgtagataagtcttttaccactttcaacaattttaaacctgtggtcaccaaatttcaaaattttgattctcttggctttcctgaaaaccatccaggtagatcaaaatctgatacatactatattaatgaaaactatcttttaagaacacacacctctgctcatgaagcagaatgttttcagcagatcaaagaaggtttagatgcagaatctaagggatacttaatctctgcagatgtttatagaagagatgaaattgatagaacacattatcctgtgttccatcaaatggaaggtgcaaggatttggaaacgtaataactctgaacttttacaaaatgatcttaacaaattagaaaaggtattgactgagtcacaaaagaatattgtcctaaaatgtgttagagacgatccagagattgatccagtggagaatcctaaacaaacgtacatgagtgatcaggaggtcattttatgttctaaacatatgaagagatctattgaattgattatatccgaagtgtttaataggaaagtacaaagcatgaaggacgaaaaattggttccaaaagaattaaaatatagatgggtcaaagcttatttcccttggactacaccatcttgggaaatcgaagtttggtggcagaatgattggttagaagtatgtggttgtggtttagtacaacagcaagtgctcctcaatgctggttttgaaacagattctacaataggttgggcatttggattaggcttagacagaattgctatgttattatttgaaattccagatattagattgctttggacatcagatgaaagattccataaacaatttaaatcagaacatattaataaattcaaaccatattctaaatatccaggttctattagagatgtttcattttggttaccaaaacaggataataaaaatgtaggcaatgttgtacagaacattgaagtgcatactaacgatataatggaaattgtgagagatgttgcaggtacattggtagaaagtgtcaagttatatgacacttttgtacatccgaagacaaatcaaaaatcaatgtgttatcgtataaattaccaatcgatggatagaaatattactaatgcagaagttaacgaattgcaacgtaaaattgaaaaggaacttgttagtagatataatgtaattttaaggtagtgggtatacaataaaataaagcttgtaaataataattcaatgatcaagataatatgacttattatgttcttttacaacgtgtatacatctgtaaaagaggagaataagaatatataattgtatttcctttataatgaatattattgtatatgtaatctataaataaaaaatagttagaacaatcaatatttgaatgtacgaattcacaaaaaaaccattagtattattatgatgagcatggttatttatatttttcttctgttatttaattacaattgtccgggaacgagttctgcggtaacttgataacataaagattgtgttggtgttttataggaagatcgattaatgtcctgtgtgtttaattccttaatggttagtatttttccaataaaccaatctctattttttatagataaattgttgttatccattttcaataaataccttgttctttcattaaaagcggtaaatatcgcccatagaggtgaagaattatctgagttattttgataagacttttcaagtaataaatcttttttctttgatatatctttatgtagttcacttctattcattattgtaatattgggtataggaggagttgataagtccacagaagagaaggatgaagtgagcaacgaagaaatagacagatttggatcttttattgagtatatgttttctctggtagggagaaacaatgccaagtctcctattttgaaatctgtcaatgttattttttctttcttatacttgtctaataaatttttaaataatttattttcctttgttaatttcttagcaagcatttccatatcgctgaatcttcttattatggcctgttcatataactttgtttcataaatcttttcccagtatggttgtaattgaacagtcaaggtttgtatagaagaagttatgtctttagtactatcttcaagatatattgcaaagatgtcctgtagtttatggtatacatcactttgaatatatttttgttcatcataggttattatattattaacactttcatctaattttgtttggctagaatttttcctcaatcccttaactcttttaatttctatggacgcaatatcgttgtcagcgctgttgttagtcaataataatcccatgttttctaaaataaatgtgttgatcttaaaaatcctaaacaacttattttcaacatcatgtataattttctgatattgtaccactaatgaggaggattcagtattagtaaattcatatgttttatttctatttgtcttattctgaattaaagtgttattttctatctttaaatctatattctcttgagttattttttcattatctttcatcaaacttttattttctttttttaatctttcattctctttctctatagcttccatgcatttttttaaagatttattggtattgcttaattcttcaagttcatgttgatactcagattcacgtctactccattcgcccctattagagttgaattttaaattttgttgtttattttcgtgttctaatattttaatcttttgtttcattctattttgaatatcttgattagtcctattaaaactatctaaattgtttctgttcactttaagtaaattgtttatgtcatttataaattggattttgttgtttactagctctaattttaattcttcttcaagattcgtcagtcttagaagttcaatatttagatttgccatagtttctttatatgcagccttttcaaggttcaaatctgatatttttgaaattttgtcattgaggtttccttttatttctgaatttttaactttcaatgattcaatttttgacttcagatctgtaatattttcaattaattgcaattctcttactttataaagtttcaactctggttcatctgcatgatttgtattatgatgaatttgaagtggtccaaggtccattattgaaaattgtttgctttctgcactatattttaaaaatgaatcattgatgagggttgtaggccaggatgtcaaatttgaatattttgactcgtgtaataatgattctaatttttgtattcttctcttataagattcaataagattttttgattgcattttatttgaatcaaacggtccttgatcaaatttagcatgttttctactatcattacagtatccgtcgtttttttcagtcactattttctcaggttgattattagatcttggtattgccaattcaatattactagaacagtttatattttttgaagtctcgtattcaatatctttaagatgatctgtttgtgcttcaagcaatctcttctttaaaacattaataatctctttattatctgttaatttgtcaaaagaactaatgtactttttaataaagtttaaaagtttcagacaagtatcatctaacgttttaatagtagtttcattatcattaaaatcaatagtgccaaggattttcgatttcaaactttctatatcaatcaaataatacggattactattaccattattatcatcgctgattatttctcttgaagaattttttcggtttgacgaatcataattaaaaaaaatcgaagaaatagatccaaatatttttatccacttatttcttgtcaataattcctcttcaagatatatattcattgatttaagatactttgagtgtttcattagtattagtaatgcccaattgatttttctccatgtttcaatcatatataatccatagacgataggtaggtcttctatgtgtgcaaaggcaacatctaatgactgaaattgttttaaatcttggtttagatggtctaatatgaactgttttagatcagtaatattttgttcgatttgatatagtctagatgatataggtttggtttcttcttttaactgtttttggtaatctaacaattttaaggatttgcaatataaatcttgagacgtttcaaataatggaaataaatgcttatcttttaaagactttaatttttggatcatatcttcatcaattttaatattagtgttattataggcaggatcattaataatgtttctactgaaagtttttgcaaaattgattgagtctttaaattgagaaaattctgtgtcatttgtcactttacagatatcatcgttattctttgatttaaaagtttggttctttaaagaattaagatctgatttaagtgtctcaaaatcctttttaatttgtttaagattagaattaatcttattgaatttttcctcaatgatcactcttagtcgactcatttgtagatcataattttttaaggtatgaaattcaactaaatcttgtaaagtctcttggtccgtatttttcaattgatagagaggcaatttatttagaatttctatataaatcttttcccattgcatattttctctatcatttaataggtcattgaaaaaattatcatttttctttaacaatttggttagatcatcaattaaattttgtaaatattggataaagataaaacagctgcgtattaaaatgggcaacttatttgagactgaagaaattacatcgtttaaataatatccatcgatttctaaagcacttagccaacctaagtttgttgttagtagggaaagaagactggaataattcaaatcaagtatgataacgtctgaaagaggtgaagataaaggtttaataagagttaaattatttcccctgtagtcttctataatattatttttactgaatatccaaatctctagtgtatttgatttatttagggtatttaatattttcaaataattgaatttatctaatttaatacccatgggactcaagagtaagcagatatgatcctccttcattgaccatttggcattaataaaattacataactcattccaaacaataaaatattgtaaattaatacgttgggaatcaccagtctgagaattaattagtatagctgtgtaatctgcaggatctttattcataatttcactccttcctgtatatttaaaagaagaaaaaagaagagagagagaagtaaaagaatacagtattagaaattgtcttttatttagatgtgtagaaattgacttattttttttttgtattttatgttggaatgctttgaaggatatggatgtataactgagaccataaccttccctattcttaattattacaattattattagtaaaattattttttgcacttcctctctttattaatttttcgtttcagttgtttgacacttatatattctaaccttattacaaatttatttcgggaattccagtcaaaccatcagacaggttcatatatgtgtaatatatatttgtgtgtatgtgtgcgtcgatatgtatattacatacttcttgactgaacaactaataggataatagaagttttaacagtgatagaaacatgtatatagattatatgaagaaagtggtttgttcagatgtgctgattccactattttcccttctttgttctttcccgccatcatctccccctttcatcctaaagagaatttttagatagatcaaaaaaaaaaaataaagagacaaagaaacaaaaaaaaaagacgatgtcgaccagaacccacataccggggaactgtgtatagagagagagatttgtagacatagtgttactttgtatgctattatagagtagtaagatggaatgaaatatggatatttatgatgaagaattacattatgaaaattctaaccagaaacaaaatctactagttcaacaataaacaaacttcattgttattgtttttattgttatagtattatagtattattattactattattattactatatttcgaatattagtaaattgaatttctcaaatagaagtattaggaaggtaggcgatccacatgactattgtatataaaccattagatattaataatttaaaacatttcaaaaaggtaaaagaattgattgatatcgatttatcagaaccttattcaatatgggtatatagatattttttgaatcaatggccagaattggtatttctagcatttgatagtgacggaaaagatagtgatatgccaattggttgtataatatgtaagagtgagagtcatcgaaacgctagattaagaggttacattggtatgcttgctgtagatagtctgtatagaagacgtgggatagctaaaaaattggttgagatagctatagataagatgattgagaacggttgtgatgaaattatgttggagacggaagttgaaaataaagttgcactaagattatatgaaggtatgggattcttaaggataaaaagaatgtatagatattatttgaatgaaggggatgcatttaaattaatattacctataacagaaaagtcatgtgttcgatctacgtttttattaaataatgatgaacaatgtgtataaacagtgggtagttattaacaatccataagaattccagttacttttttgatgagtaaaatagtatacggtatataggaaagaatgacaataaaaaggacatacatgtagtatatattataaagcgataagaatacaatttaacagactataaatatatatatgtatgtatgtatagtatatatatatatttatatttacatttatatttatatttatatttatatttatatttatatttatatttatatttatatatagatgaatctgagggactaattgatgggttgtttaattaatacagaaatttaaatataaatattaaaacaattaataaaaaagaagtggatagtttaggagagataaattgaattaaaataaaataaaagtaaaagtaaaagtgaaagtaaaaataaaagtcagtaaattaatttaccatgagaatatggaaaaaattaactttgtttagtagcaagatataattccttttcagattcatatcttctcttgtcagctttagccttggcttcatatggttctctttcctctggagacaaagccttccatttttcacctaataatttaccaacttgaccaaaggagacatctgggttttcagatttaataatatctctattttcgttggcaaagaacatgtaggcagataaggctctctttggagcatttggatccttctttcttctggaagatttctttctttgttcgaccatttttagtttatagcttgttgttcgtaaatgttatgtgtgaaacagaagtaaaaatatatatatctaattgtgtttacaacagataaatagatagatatgtgtttgtttgtttatttgtttgttggtgttttatgtatattatagatggtacataaacaaaaccgacacgtaaaatatttattaaataatttgtgacgctttcttaaacactagtaaaaaactctttatagtgcgaaaaacttaatctagtatagtagaatactaatagtatgtgaagaaacactaagatgggtactaagagaaacatagtgtataatagtagtacatagatacagtagatagatagtagtagataagtggtgaaacaaggttctgtggatagtttggaaatggcgagtaataaaagaaaaattttctttgctctgcctccctgaataaataaaataaatagagaaagagattcgacgacgaaacaaagaaaacaatcccacgaaattcggtgaggggaaaacgcgtcgttgctggtgatatgttgacgtcaatacaataggctttgcgtttattgggcgtttcttttgttcttttttatcttttttttttgtttttttcgtcttctttctttttttaatcatgtcgcttttctcgaactcaaaattaagagataaggcttgttgttttatttccgcaagcggtaggaggtgtgccttatcaatttccctgttttcttctttttggttcgtttcattttcattctcccctatctcctcctttttttaaagtttttgtgtgtgtggatggtaagtgttgaaatcacctggaccatccatttcgcgttgtcagttggtgtctggtgtctgggtgttaatccagacattaggttatctggttcttttttttttttttgattcaagtgttggtaatagtatatgtgtcataaaccatatatatttttaaaagcatcagtctttctcttaggacgtaaccattgtatttcattttcgaatttcgtatatttatattacgacaatactaggtatttgtggtttagaagaagtatattgaattagatataggcttgctatgatttttttcttttgataatgttggcaattgataaaaaaatgtatataatacaatcataaattaataaattttgggatatgtttgttatgtaccatgttacagagtattgtcttttatatattttttatgtttttttttttcataattgattgcatgtaattattttaatatgtgtgtatgtatatgtatggtaattttatgtgaaacaaaaatgcctaacaccaaaaatgaattgaattgataaaaaagaaagttttttttttcttgaattaaataataggatagccattgaactggaatctttcataattgataattgttaaatgcaagaatatcaaatatttaatacagtgtaacttatgaatcaaaatcttatgcttaaaaaatgcataaatatataatcaaatcttatttttttttatttatataatagaatttataaaaatcttcaactgttattgcaaagcttcaataatgaaaatttgattaaaattccttataaatttaatatgctgaaatggtataaactactaatagaatatctgtagtattataagttttttggtttatttttagtagaatgttagtagtacaataaatctaatttacattgcatggtttttttttattttacagaactaatatataagacacagtaatgtatagtgtaactcatttcattttaatcatcttttaacattaatatggagttattcttttaatataattttaaatatcgattatagtagcctatttctttcattttttatcagttttcctgtcttgtgtctaagagtttgtttattttgttttagtgttttgtacgtatagcagccgttttgatatttatacaatcatttcttttacaaaatactaaaaaaaaaaaaaaaagaataaaaaagagaagaaaaaaaacaatacaaatttaatttagtgtcacaaattatacatcaattatttatcaataaaaaaagaaaaaagacaaatacaaataatagaatatatatcgattatttcatataaactttattctggacctttaaaaaacataagtatattcgtaaccttcctatcaactatcctttgaccaagttaaccaatcttttacctctctctttctttttatgatattcaaacattgttaatgtcctccaattatagtaactcactaaatgatcataattcattattaaatattccaaaccaaccaattaacacttcaaatccaaaatacaaaaactttaatattcacaatacttataaaaacaacaatgatagtaatgttcaaagaagaaactatgttgatatcaaattctccgtccccaaaagatacgaaatcattaaattgttaggcaaaggttcttatggagtagtatgttctgcaagggataaaaatattaaaaatggtgattatgtattagcaattaaaaaaataacaaacatttttaataaagaaatattattaaaaagagcaatcagagaattaaaatttatgttttattttcaaggacataaaaatattgttaatttagttaatgtagaaattatctttaatcacccttttgatgggttatactgttatcaagaattgattgattatgatttagcgaaagttatccactctaatgtagtatttacagaattccatattcaatggtttacttatcaaattctatgtggtattaaatatattcatagtgctgatgttatacatagggatctgaaaccagggaatatattatgtactatttatggtactttaaaaatatgtgattttggtttagcaagaggaattggtaaatcacagagaaatgtccaaaaatctttaagaaatgatattaatataggtccagacgttgtaccacatatcactaattatgtagctactagatggtatcgtgcacctgaattaatgttgtccaataaaccttatacaatgtcaattgatatgtgggctattggttgtatcttagcagaattttatcatagaagacccatatttatgggaaaagattctatacatcaagtatcagagattattaaatatttggggacaccaaatgaacaacttctaaaacaatttggatcaattaggagctggaatttattaaataacattaccacaacaacaagaaattatactggtcaaagaaaatatgcacatgattggaaagaagttttcccattcgcctgtaatttaggattgaacctattatctaaattattgatttggaatccagtggaaagattgacagctgaaaaagcccttgaacatccatttttaagtccagtaagacgtaaaaatgatgaacctaactgtccacatggttcttttgagtttaaatatgaattagaattaaattcaatgtccaaattaagagaatatttgatcagtgaagttatccagtacaggaataatagaaattcaggatagaataatacagctaatatcatttctcctctttctttttttctttcttttacttattaacatttatacatatatgtatgtttatatatatactatttctatatttcacctagtctattgtatgccatccttctttttaaactatatatagtcttggataaaaaaatttttattattacttactccaaatgttcacttgtgatattatatacgtatattcagacataggtacatatggtgcagctattgctcatacccttccatattattctttgttttaatcgctccattacacttttctaaataatccttttaattataaatttcttaaacgttattccaattttccttttaatttataacaaccgagtgaaaaaccattttattttagatatcaaacaagttctttaaagtttttcaaacaaaattattttcacacaaaaacatatataccaagcatacacgttataaaaagtgcttgcaacatatatggttgatttttgagccttcctcccacaatcaactcattttaactgtattcaattgacataactttttgaacaagcctttttagctaccatggatggatttaatcaaaaagaccgacttaaagttaaaacaaggcgcaggcaattaactgtaacctccttgagtgaggatcaaaaatctgcaatgaattcttctatagacaatttacaaaacgatttggatttggtcaaaagtcaatggcataatgtgttaacgaaggatacaaatccattagaaattgcattggcttttttggatacaacttctgttggattaggttacagatataatgaatttaatcaattagagagcactttgggtaatcacctgaaggatgttgtaaatgagcattgtcaagcattcaattcaaacgttgcttcatattcaaaaactgtttctgctttaacagatgcacaagagagaactacacaattaaaaaaagatttcaaagtagtttcagatatgatcaccatgaaaaaaggctcattagaagaactggatcaaaaataccttcagtacacaaacttgctttcttcattatcacaaatcgaagaactgatgaagattccagaacacattgaggatagtattagaaaagaagagtacagaactgttcaaaaattgattcaaagaagcttcattatattaaattcaccaaatctaaaatctctaaaacaactggcacctattaggcagcaaattgaattacaagagcacattctttttgaaaatattatccaagaaatccagtcaattatttattgcaaaaaaggcttacctgataaagactccaatatacttaaaactattagtatatctcaaaatggatttacaagtttagagaattacctttttaatatcgctaacattgatatcaataaacaatctggaatattaaatgaaaacttggaaaagtttatgaaattactagatgaaaataatgggtttcaaaaaaccgaattaattaaagaaaataattcccaacaatctgattattatagactttttgatttactgtctcttattaagggaacaaatcgattgcctgctgctttaagtattttaacagaccgtactaaagaggaaattcacaatatcatagtgaaatctatggaacaagtacgtattaaacatcctgctttagtaaaaattgttaataattcagttacggaagatatttttggtccctcagtgaatcagctattttctttagtaatgagagaatgcttttgggaaatctttttaaaactgttgactgctgttcaaggacatagagctatatttgaaattatttcctttttacagaattctcagtctattcatagcgtttataaatttgataaaatattagaaaagatattagatgaagtcaagactttattacatagatatttggtcaacacacaattagcttcaaatagccaaaatattaatagtgaagacaaaaatataaagaatgaatctcaaaaaaaacattttgacaaaatattttcgttacaagataacattgaaatggatattctttcaaaacaaaaagtcagtggtttaaaatcacttttaaaagatatctttcttggatttacagttgattcaaatattgatctagataatatttatttagaagatgattcatttgaacaagaagaacctttaataccaccttctgtttttaacatgaaagttattttggaaccatttttattgttttctcaagcatcttccaatttaattccaccaactctatcaacaaaaaaatctgtgtctccccttacatttttcaataaattaatggaagaaaccttttaccctaggttgaaagacacattaaatcatcttttcatatctaaagtcgaaactaacaataagtttagtatagaaacaataaatgatacaaaagcaattcttaagtccgcatttgactttcaaaagctattttataaccaaatttcaattctaaatgcttcaaatacgtttagacctaatatggttagtttattattagaaatattatcgaaattctttcaatatatgaaaaatactttttatgttatattagatggatcagataaaaacttaactaaaaacatacttaaaaaatggtttacagatcacaatttgataaaaactgaagaattaattgttgcaggcaactctgatcccattagtgtagaatatgatatattataccagcattttatgaatttttattcaaaaaataaccatttaactaataatgatcatttaaatgaaaatatgtttgactctctaatatatcttaatagtactttgaattggattgaaagctggttacctaaactaagcagaaccatgaattcttcaaaggttgaaaacttcgataatgctatattaataactgcagatcaattaaggaaaaaatggtccttttttgaattttcagacgtcaatactttagataataaaaacatcaatgcttatattcttttagacgatgaaagtctaaccaaattcaatgaaatcctgtatggattccaagatttgaacatcaaatccctcatactaatgagattagaaattcgctcaaaatgcattcataaaattggtagattatttaatggtaataaggattggaatttggaagtcagtaataatgaaattgatttgaatatagcaagtttactatctgatctacgaagaatagaggataaattaaacaagcaaagtacaaaagatgttaaagatatcgttttcagtggtattgatgtgattatcgatatgtcatttattaaagggtctaggctgatctctatcataaatcaaaacggtctcaagaaagttgaaagaaatattgatattttacaacatggaattagaaatatgtatcatgaaaaaaacaatgttaaaagccccaaaaacaatgctattaccacatattcatctgccttagatttctactatttaattggatcaaatgaaaataatttaattaataggttgaaggcaggtgaactctccgtattttcttctgatgatgtgaagacaatcttaaggttacaattcagcgaagaatttgccaaacagaataaaagggttagtgctatggcgggaaaacccctttcaatggcgaaaccattaaatagaagatacgatacagcattaaagaccattgaatcactcctcaaatgaccaagcacagcttttgtctattataattttaaatagaattatttacgtctacaccatcttctaatgcacacatatcatatacatattttttaggatttattatacacacatatatactcaaaaacgaatgtcttcaaagttgctagatagaagtatgaaaagaaaatctgaccctcaagacgtttgtcttacctccttatctcctatgggttttctttctctattgtttattttttttttatttttacagtaactaaaactaataatatcaaattaatcacttctttgagcccagaaagaaaaataagaagagaagacagaaacttacttttatttcttcttagaaacattaaacactgtatcgaacggtacgagttattacataagaagataattacgaaattaagatatcacaaaaaaaggagaacatcagagaaatatcaaaaagaggctattctaagacattgaagaagaaacccttatatatctaattaactaggggaagaaaggacaaaaagaacacaaaatttttaaatataagacacattttaacaatggatgctattgctgacccaacattccaacaaacaaaggcaagatcgatacatacagaagaattaccctctttacttactgtagttcttgatacatcacctaaatcatggatcaaatttgatgaggaaaccgataaaaaggataatattctacatgttttgcaagcattaattgtatttttgaatgctcatctatctttcaatacatccaatcaggtcgctgttattgcagcgcattcacatgggatcaaatatttatatccaaagaataaaaataacactgatagcggtaatggtagtactaccacagataataacgatactaagatagatactgtgtctaattcaaatgatcaatgtattataagtcctggaatgtatagaagatttaggaatgtagatgaaactctaattgaagaagtcgtaaaattatttaatgaagaaaaagaacgtgtagataaaactatacaaaaaagcacgttaccaggggctatgtcagctgctttagcttataccaacagattgctaaaggagttcgaaacattatcgttgaaatgtagagtaatggtagtgacatgtggtaactcggatcaaaaggaggaaattttccaatatataccaattatgaattgtatattctcggctacaaagattaaatgccccattgatgtggtgaaaataggcggttcaaaagactcaacgttcctacaacaaacgactgatgctacaaacggtgtatatttacatgtggattccacaaaggggttaatccaatatttaactactgcaatgtttattgacccatctttaagacaaattattgtaaaaccgaatcaaggttcagtagatttcagaacatcttgttatttaacgggtaaagtcgtcgctgtaggatacatttgttctgtgtgtttatgtgtcttatccataattccacctggaaacaaatgtcctgcttgtgattctgaattcgatgaacgtgtgattgctaaattaaaaaagagacctgttgtacccaaacttaagaaaagagtcaataaatcaaaataagtaccttcttatgattcctcacagataaatgtatactcattaatacacacacataaatataaatttgtatatacatgtatattatgcataaataactaagattgtttttctatattaaaatacaaaataaattgacaacagacgtatgtaaaaagatttttttctgaagttttaggtcaacttttttcagatggcggtatgatgaaggagatgagatagggaagaagataataaagaaactagaagaagaatataggaaattagaataaaagttacatactataatgtcttggctagatatcattaatacgtttatgtttttatacttgaataaaataattatggaaggaaagtataacggtgaaaatgagtggaaaagtcgatccattatttggacaagctaaggtattctccatagatgatgaaaatgttaaccctgatgtaataaattatttaagaaatgttcgaaatgaggctcttactactagtgcaatttctatgagtaatataagaagttatgtcaataaatcaaatacaatacgacatgatgcatctctatatgatgacaagaatgatatatctatgaacgacaattcaaagaataatagtaatagtaataccaaaaccactaattatgcaataaaaaatttaatagatgaaagttcagctaagaaggaaggagtattgattatgaacaaaagaaggaaaataatgaataaagatacatcaatgaaatcctcgatgcctaaaaatttaattaattttaatcaaagaatgaaggctgttatggactggtttcgagatttacaagatgatatttttactttaccatgcaattcaggatattcttatgatcataatacactagagttattaatatttaatattcaaaaagtagtaaatgataaagagacaacgaaacaaaataatggtgtgtcattacatttatcaaacttattagaaaattgggctccatcagaagcaatgaaacaaataaaaaacaacaattatacggttgatacagaatggatacaagaattgttagtcaaattacaatgtgttagaataccaaatattgattttttaaaatgtgtgatcacaggaaattattttgattttgaaccacatggataccgtgcatggaatcaatttctattaaataatgaaccatgtaaggatatgtttaacactatgataaatggcaataatatatggttattggttaagtatatggcccaatcatggataacagagataagtggaaaacaaaaccataacataaaattatggctaatttatattttaatttatttaccatcttcagcagtagcaaataatacaagtacacttcgtgatttaggtaaaaaatgtagagaaatcatacaggcatattattaccagccatttcctctagataatatagatgaacaaatcaacaagcataaagcaagtaatcctctagtacccttacaaaaaagtatacaactagagtttaaacaatttacttctaaagaaattcctaatgatactaccctcttagaattgactatatatatcattgccacaaaatatggacaaatggatttaatccaatgggattcataactaatatagaaagaatttttttcaaataataccacattaagaagtcaataacagtataaatgataacagttattatagatatgaagttacgtttttttcaatatattgtaagattatattatccaatttcagcaagaattcagatcttcttataatctattatatcccactttataaacaactcctatcacttgaaattaaataagtaataactagacaggagcatagaactacaattactgaaaaagagactgacaccataaaactgatgcaaggatgaagagccggctatttatcatattatatattagtatatccttttacacttccataagtcataaaagttatttttaatattttttactgaaaaataagggctatgcttatttttccacaaactatttctaatcgaacagaaacaaatcagggttaatatgaaattccagtcccctttgttttaataatttcatattttccccctttgcttcttttattctttcttttccatctctccataacaacaaaaaacaatgaaaaaagccaggtcttgcaatttttttaatcttttcattaaaaaaacattgatcaaaaaattctcgatgacattttaaattggttaatttgatgttaagataatccacaaacaaagaatacctgtggacgtataatataccaacattgtgagaattaactatatccttgagttaaatgatgcttttatataagtgaattgatccatttaatatttgtgactttttttattcgaagaacacatttaaataaaaagaaaatagcaccaagcattacatatatatatatacatatctagtatctaactcctaatattcttaacttatttcatttgcttataccatgtctgaagagttcccaacccctcaattgattgatgacttagatgctcaccccagtcatgacaacaccagagtgtttaaggacttactagcaggcacagcaggcggtattgctcaagttcttgttggacaaccatttgacactaccaaagttagattgcaaacttctactacacctactaatgcaacatttgtcattaaaaatcttttaaaaaacgaaggtcctttaggtttttacaaaggtaccttaactccgttgatcggtgtaggtgcttgtgtatctttacaatttggtgtcaatgaagcgatgaagagatttttccattcagtaaatgcaaagaataataataataatagtgtcaacaataatggcttactaacattaccacaatattatatgtgtggtttgactggtggtgttgtcaattcatttttagcatctccaatagagcatgtaagaattaggttgcaaacccagaccggatcgagtaaaaatgcagagttcaaagggccacttgattgtataaagaaactgaagcttcaacgggttttaatgagagggctaacttcaactttattaagggaaggacatggttgtggtacatattttttggtttatgaagccctggtagctcatgaaataaataaaggttgttctaggacagagattccagcttggaagttatgcatgtttggtgcgctatccggtactgctttatggatgatggtttatccaattgatgttattaagtcagttatgcaaactgataatctgttatcaccaaaggctggtaattctataaaagaagttgctaaatacatttataagaaccatggttggaaaggtttcttaaaagggtttggacctactatggttagggcagctccagcaaatggtgccacttttgccacatttgaattgactatgagattgcttgggtaattgtataatatatttctgtattctttttactcatcttctatacacaaatacataaatgtatatatcatattcgttatatattaatttggatcttccaatcttcttaataagtattctacttcgacttctttcgtgattggaataacaaattctttataaatcttgactaaatacttgggtgttattcttctttccccttcaacgttagttggatcaacaccatagacttctgcctttttagtcaatctttccaagatcttagcttccacttctgtattagttatattgtgcatgattccatcaacgtccttcttaatgattaaatcattatacaattctttattagcttggtatttagcttcagctacaaatttcccaaaatggattcttctacttagactctgtaaacattcaatatcacaagatgcaattgacccatagttgtttggatcatctttatttactttggagataagtgggaccatcttttcaatatagatttttttaattttatcattataattgatttcgttcgaatagtttgccaatatcttagggtaatttatgcttggcaggatcgatttaagtattttatcagggaaaaatggggtttgatctggagactcaaatcttcttagttgtgaatgcgtgatctctaaatgcatcaaagcccaatctaggaaagagccgtggaaatccgagccaagagtgaggtttgggttatcgatttgatagacaccatagcaagtagcaaaatgtgatctttcgataaatttgaagataatagaatcttccatcttgatcaattcacctctaatattttgtaaattcaacacagtctcaggtttagtaaaatccataattcttcagtacctatctatatgtgtatgaaaggaaaaggtataaaaatataattcctctctgttactttaatttctattttagttagagtgaataatattagaaaatgtatatatatatatatgtgtatgtatgtatgtatgtatatatgtttgtatttagaatataaatattagctgactgaatatatttatcaatttttctgatcttttgttttttttttttttctttttcctttttcctttatttcaatttttcctcgacagttcctccagtaacctttcgatgaaaagatgattatttttcagagaagcttccaactcagtttcgtcccttggactctctttgttccacaaccttatccaaaggaacctatggattcgatccatcttggacccagtgaacccaatatatttctcgtacaattgttgccagtagactctttggatatcctgtttttcaatcgtctgggaattcaccgtatattgattagacagatgaatagagtcttgcaaattatttaaatagatagaaccaccccatacaactaacgtgcctattgccatatacaatatatgtagtggattgatgtcggatacatcagattcacacttttcatagattggatatggttgataattgtgtgaatatgcatgagcatagaaatgagggtgcgggtgggaggaataagaggaataagggtatatgggattgttatgaacattttgtccagttagaagttgtttgtatgcaacacttatagatttaaatcgttttaatttttcacgtggagatagaatgttatcgtttttttggtcaaatataataatatttgtagagatatcaggatgatacaatttaacgtattgatggtatatatttttcaaatatttagatcttgtcagcgaactgctactaccaccgccacgatcacgatcacgatcacgattatcattatcattatcattatcattattattattattatttcttatttcaaaatcctttaaatgaaatatttcatatggggttggatttaaactacctgatggccaaagatgatctatatgtgtttttgttgtagaatagaatctaattttgttcatagcaattatatatatatgctctataatttatatttatacttacgtatataaatatatatatgtataaactagcagaaggaaaagaaaaaggagaagccggagggcagtgtaaaagagtagaacaaaatcactaatgatcgatatatagagagaataaaaaaaatgcttcttcgtatgattttgagtgttgtgtgaggttatgatgatataaagcatgttaactataactatagcattaggttgaggggacatcccatttccgtcactgctaactccgacgaaccaaaaggaaggaaacaaagaaaaaaaaaaacacccatacatccacattttgaagccgggtagtgaaagaagaaaataaaaataaaaaaataaaaaaaaaaaagacaagtcgagaaatttcaattcaattacaaatacacttatacatatgtgcacagctatataggaatctctgactggcgagtcgttcaattaatatcttattgacgcttatattcaaaaacagatacacatttatagagagacaaattgacaaagagatattagtgagcaagaatgtcaggtcaatgggatttgaaaggtttacagattgcttatgaagaagctcaaaagggctatgatgaaggtggtgtgccaattggtggatgtttgatcaataacaagacaggagaagtacttggacgtggtcataatatgagattccaaaagaattctgctactttacatggtgaaatatccacattagagaattgtggcagattacctggtaaggtatataaagaatgtactttgtatacgagtctgtcaccatgtgatatgtgtactggtgccattattatgtatgggatacctagggttgtaattagtgaaaacgaaacctttaagagtccaggtgaagaatatttgaagacgagaggcacagaggtcgttcttgaaagagaccaaagatgcattaatttgatgcaaaagtttattaaggagagaccacaagattggtttgaagatattggtgagtaagtggaacaacaaaaaagtaaaaaaagcaaaaaaaggaccaaaccaatcaaagtgacagatataaatacaaatatacatatagatagatataaacatacatatacatatatatatatagaggaatagaaaataataaaagagaaaaaaagagaaagaatactatgcatttaattttaattatttatttgattgttgttgaagatcttgtgggaatattagatttagataacaaacaactagaccaaagaaacataaaataattttgaatattggtgactgatctaaaaaattgtttggattattagccagattatttttcaaaacagataattgttcatcggatatatttaacatgtagtggaaactttgtataaaagaaaaccatccgacaaatttatttcttaaaaacattgcagccattggcattgattggtttacaatacctgaaacacttggttttgatggatataattcctttggcggtaaaattggtttatatctaatttattaaacaaaaaaaaaaatgaaaaaaaaaacaaaataaatataaagaagggcaaaatgagatcaggacttgttaatatcacatgttcatcaaatattgatatgaaatgatacttgaatatatttttcaaaaatgaaaataaaataaagaactttttatacatactttgaacataaatcttttcttttaacgttattgattggcattttttctctttttatctttttgtatgtgtatatacgtgtgtatgtgtgtttacctgtactttaatatactaatttaacatgaaatacactagagagtcttatatataaatgtaaatctatagaaatcaatctttttctataggaatggtataatgcacacaccaatagatgtgcgaataagtactgcctacttaggttaaacttctttttttttttgtgtatgttattctttgtgaagaattatcaatgaaaatacaaaaaaaaaaccagaggatatatactatgaaagtactgtaacaagaatcgaactctagaaaatgaaagaaataaaaacataactgagaaagaaagaaagaaaaaacggaaggaaaaaacaagaaaaaaaaagaaaagaagaagatgacacacttctacaacacccatacatcaaacctacaattttatagagacacagtttcgcgtcattcgtattttttttctctttagtatgggtattgtttttattttttattttcatttgtttttgtttttgttgaaagaaaaaaaggaaaaaaacccattattttgtcgcgccatagaaaaacaaaaaacaaaaaacaaaaacaaaaacaaaaaacaaaaacaaaaacaaaaacaaaaacaaaaacaaaaacagaacgaaataaacaaaacaaaacaaaacaaagaaaaacagaggaaacgaaaaaaaagaaaagaaaaagaaaagaaaaaagagaaaaaggcgaagacaacgacaaatttattttatttacattccattttttattaatatataaatacaacagaaaattttattttgttctgggttctattattctttcctctccttttcctctgttttgttttaattgaatggataaatgaataattgaaaaagtctttattctatctttttatttgtttcttcattcgtttgtttgtccgattttctttcttctttatctcatcctttgtttagtataataaaaaaagcgtttataacaattttctgttgcacttaattcttccttcttttctggccccgttttcttgttttgttttgttttgttttgttctttaacaacttttttatttctttctctcatttgtttcttccctcgaggttcgtatttctctgtctatttttatttgtttataggggtttttggatcttagctttaatttatactgtttacacttctcctcccctcccctcttttttgttttctactttttatttctttttcttttttcttttgaaagcgaaacaaaacaaaacaacaaaacaacaaaacataaaatataaaataaggaacagttgcctttattgttaacctccttctacttccacacacacgcataataaattaattgtttattatattattattattcctgtttttccatttgttagattcaataacattctttgtctttctgtctacatctgcttcttgttgtgtccttttgttttatttgactttacttcactttctaaaacaaacaaagaaacagaaacaaagagaagtatcccttacaagatcacaactgataatagggaatcataattactaatcatctgacaatacagtgtattgtattatttttcctactaacgcttttgctatatatttgtacatatcgatcgacatctcttgcatagagagatcttcaacacacacacacaaaaacacatatagacacttatttacacttcaacaacaacaatgtcctctattctaggcgatacacacaatgtttcttctacatcttcttcttctgccatgatccataatacaaatctctccgatagtaccggtggtattgctgcctcaagcacaaacacaactggtaacaacatcaacacttcttcacttgtaactctagagtctccttcaccacatcataaccatcatcatcaatctcttccacatcaccatccacagcagcaaggcctatcttcctctgctgcaaacagtgatataaacaacccttctaatatctctaatcctaatggcagtctgcttggtaatgtcactaacactactgctaacaacaacatcaataccaccaataataccaacaccaataacaataattctagtatagccaccaactcttcttctactggtaacactgccaactcttcttcttctccctcatcttccaataacaccaatacaactagtaacaacacaactgccaacaataatagtattaatagtatcaatagtaacaataacagtgataccaataacaacaagaacagtggtagtagtagcagtactactactaataataataacagtagtatacgtacaaatacaacccctgttactgtaccaccaactaaatacaatcccaaaaataataagattccaagaccaagaaatgctttcatattatttcgtcaacactatcataaaatcttaattgaagattggactaagaaaaatatggatataccacataattctaaaatatccaaaatattaggtaccaaatggaaagaaatagatgaaaaggagaaattacattgggaagatatggcaagacaggaaaaattggatcatgagagaaagtaccctctatataagtataaacctgtcagaaagaataaaaagaaaatgttacacaatgctgcacaagcacaagctgctgcacaagcccaggcccaagcccaagcccaggcccaagcccaagccgctgctgtagctcatcatcaacaacagcaacaacagcagtatcaattacaggcacaagcccaacaacatcacaatgtacaagcacagttgcaaatgtcccaaagtaatctattgaacgctcaagccttaagaaatgccgccgcggcagcagctgccagtggtggtggcggtgctggtagtcaacaaccattaatgaatatgcttaattcaacaaatgctaaattacttgcacaacaacaaggtttgtacaaccaacaaaacgatcaactatatcaacaaaatagtcagaatactaatgctactactgcatacatacaacaacaactatacctgcaacaacaacagcaacaacagcagcaacagcaacaacagcagcaacaacaacaatactataacccatattctttcaatacactgggtattcaatctaatcaattcatgaacccatacgctcaacaacaaagcaataacagcagtaataatagtaacggcagtacaaacaatagtaacaacaacaacagcaccagtaacactattccattctctcaatcatcgttgagtttattaaacgataagtttttgtctcgttcgaataataacaacagtaatagtcatagtaataacaacgctaccactgccaaggatttttcttatttcactcaacaacaataccagcagcaacaagattataataatgtgacatcctctatccccccaccaaacctccaagtatcaggcaatggggatgcttttgatttaactggtggtaacagccataatagtaacaacaataataacaacagtaacagtagaaataattccaatcgcaacaacaacagaaactctaatctatctgcagaccaacagtttattcaaaaaaattcagccagccaatctacaaatggctatggcaacatgaattatcaaaattattctaattccactagcaacaacgccaatgccggtatttccaactcatctaattcccaaaataacaataacaacaactcgtatggtagttatatgaaccaattgccttctttaagtaacaatatcaactcgggttctaacattccaaatgatagatccatctcaccaccacacccttcatttttcacaacaggtatttcaggtagtaacactgatcataacaacttcgattcttcaagatatcaaggttttttatacagtaatactgctactggtactacatccggtggtaacaatacatctactactaccggtacaaataatcaaggttctggttcttcttcaaatacaacaaatggcaatagcaacaatatatcctccctacaataccctttgccaccacaaggtgattactcatccggtagatcaatggctaatagctataatgctggtgcctcttctacctctaacatggtacctccactaacctcaatgatccataataacggttctaacagtaataacaataacagttagtttatgattagtataattgccatactttgctgttattcgacacaatttatctttgtttttatttttccttctattatatatatatttatttataagctattactttactagtaatgtttttctctatttgcttagaaagtatatattaaataaatgtaatatattaatatgttctacattttaatttagtctggtaacaaagtaagttatggctttgtcttattttctgttcttattctttcaataaatgtacgtttatcagtttttatctttgatgtcacatctattcttcgttcgttcacttaacatcaaacagaaaacaaagaaaaagaaaaaaaaaaattttttttgttaattttaattttataatcaatttcttcaatacaaatatgctagaatacaagagatggataaacattaggtacagacacatgcccagaaaaacagcattacaattaatatcaatcgaacaaaagacaataaagaaaaagaatagtttatcttctttttttttattttctattttttgacctatctaattccattagattattattgtttgtataccgtcaccaacctgaaggaagccacccaaaataataagcaattgtagctatgaacagtcagttaagtaatatccttatcatgttagggatgatgataatttctcgtttcttagatttcgaaaacaaattgatcttaaattctgtcaggttcatgtatttcacgtccattctttcgagtcttttaatattacaattgactaaatggaggattcaaaaggctaataatttaactgtattaaaatacgtatcaaaagattccaattcattatttgacatgacatcgaattatgaattggaaggttctgcagaattcagcggtagcggcgaaaggttacatgttattacgatcaaagactatgatttaacagaaatcaattctgctttgaaatcactgtttaacaatttaatgatcatgttatttatgcatttctatctcggctacacaaacccacttttcatgcaatccatatcaccaattaaatccactttagaaaataaagttgttaagattatgtttttcaaccataatgatactggatatctaaagagaccatttaaaactgaaccaatgtttggtagtgacaggtccaagaataaaaactcaatgatgaatatgatatccgatggggatataaaaactgacaagaagactattgaaacctttgaaaaggctggtaacggtggtatcaaatatgattagattagtatatatatgtacatgaaacgaagtgattaaattcagtaggacaacttatctttttctcttccattgacaattttttttaacaaggtctgttttttaataatattttctatactattatcattaacctaatctatgtaaacattctatatacaataagccatccttttatgttttctttaaaactatgataaataaatacatataaattttacgtgtgcgtatatctaaagtttgtcctcctgtactataacatacaacatgttatgaccttgcaacaaatattcaaacaacagatcttaacataaagaaaatgatctcattaccattaaccaacaaaataagtccagcataaaaagagaaaaaaaaaagaagatagaaaactgttttgttttatttcatttcattttaaacagacatgcagagcctaatttgattgattgtgtgcaccttagtctctgctcatcaataagataacaaattcagttaacaatgaatatattaatcctaggagctggtggcttagggtgtgaactgttgaaaaatgtctctatgatggtgatcaggcaagagattcaagtaaacaaaatcactatcatagacatggacaccatagaattaacaaatctaaaccgccaatttatgtttacagatgaagacattggtctgaataaatccgaagtagcagctaaatatatatcgaacaaatttaaaaaaatggttaatgtggtcccaatagtccaagatttaactcttttaaacaaagaattttatcaagatttccagttaatattatctggcttggattccgtggaagcacgtagatatgttaaccagatatgtgtccagattgcctacgagagccaatttaatagcatcattccgttgattgatggcggtctagagagtcttaagggtcatgtaaagttgattatccccggtgtgactgcatgttgggaatgctcaatttctacattacctacgcagggcacgacagaaaactcaactggaccaaagatcgggaatgtaccattatgtaccattgccacgaatccaagatcgattgaacatgttattgaacatgtgtatattaaagcgttggagaacagtaataaagataaagacaaacaaaacttctatttacatgaaaattgggatcaagatgataatgtaattaaaagactgtttcgtgaatgtgaagaacgtgcaatcagatataatattccaagggaccaactaacaatacaccatatgttaggtataatgaaaagaattataccaaatgtctgtactacaaatgcaatgattgcagcagaatgttgtatggaattgtataagatatacaacgatttaatagattttgaaggtgaaccaaaaaacttcttaatgatgaatggaaatagaggtcaattctattataaattcacttatcaaagggacccaagatgtccagtttgtaatattataccttgaaggtcgtctctgcacctaatcatgcgttactccgtattactttgtattactttgtaatattctggatcagcccactgactcattttgacatgccatctctctttcaattatctaattgcccaacaatctgtgtttttccaatattttcaaaaagttaactcttgcagaaaaagatagaagattttgtaatctcagtaccgaattgattagtaattgtctactgtgaaatttcatggttaaaagagaacttgcgaactaccaagatcagaaccacattagcaggagtctaatttgtttgttaaatctgcttcatcctttttattttttataaaataccttttaactgcaaacaagataagcagtagtcaaaagggaaaaaagacaagacaaggtaagacatgaaaaggaaagatgttgtcattatcttcacatttattatcaattccacaaaaccatagaccagttttatttttaagaactattggtctaaaaacactatcaaaaagtttaatttcccaaagagcagccaatgtccgtatattcaatattaggaatattcaagaaaaattttacactattgaaaataaaactaatgatattttaattactcctgagaagatcttaaacaaaccaaaggatactattttatcaatctcagagagagcaagtcacagattaagtgagatttacatcaattcgaaagaaattctgcaaatcggtgtggaaagtggtggttgccacggttatcaatacagtttgaaacttataccagatattaaagatatatcaccttgggaaaaattagagaaaaaagaacttaatagtgaaaccaaagcggatccttcaaaccaacatgatgagtttgatgagtttgatgagtttgatgaattgagcccggaaaaaaacgtactttatatacttccgaataacaaaggtaaaatattgattaacaagatgtctttaaagatattaaataaaactaccttaatatatactactgaattaattggatcaagtttcaaaataattaatggtaaattaaaaagtaaatgtggatgtggatctagttttgatttggaagattaattttaatcttaaactacaaatgaaagaaacaataataacatcaataacaacaactactacttattattaatttgcaacgaagaaacaaaaaaagaaataaagaaaataggtacttaaaatttttttattctactttatattcttgtcaatatttttttccccatcaattatatacttatcttagtcatttatttatgaaagtatggataaacacatacaatactatattcaataaaaaaacataatagataacttaaatattactatcgttattcttcttatacatcatgaaaactaattcaagttatttaatcaattaatcactagaaaatttacttacttactcactttgcataaaaaatgttgtttaataattaagttacgcaatataagttaattttcatattttatatggtaaatgaataaactgtttcttgatacttttatcatctgaatttttaaagagtaaagatacaaaacaataataactacaacttattattcttacttttgtctttttacaatatgtgtgtgtatgtatgtatgtatgtatttattggtttatttccttatcttcttctgtttttttaatatctatttagatagtaaagatgcgaaatcagctacactgattctaccagatccattactgacttcattaaacattgcctctaattcttcatcggacaatttttcaccaatagaattgaaaacttgttttaattcacttaatgatatgtacccatctccattcttatcaaataccttgaatgcttcgatgatctcttgtgcagaatctctagtattcgattgtcttgccattagagtcaaaaattcttcaaaatcaatctcatggtttccatcctgatctatctcattcattaagtccgtgatttcagtctcactaggtgacaatccaagtgatttcatcactgttgctaactcactagcggaaatggacccactattatctctatcaaaaagattgaacgcttccctatactcttcgatttgttctggtgtcaatgaactactcatagtaaatattcttaattataatagtgacagtaatatagtaataacaattgtaaaaaataggtataagaggacttccccttgaaaaattatgtcagtttatatatatagatatgaatacggttgatatagttttgaattggagtttagatacttgtatgtctaaaaacttgccgaagttcaattcccccattttagtcaaattcacactaacaaacagagataaagacacccatatatatttatatacatatatatctacatatacgtacacactgtttattatatttcttatttacataaaattgtgtggctttgatcccccccctccctttcctctacagtaaaaaaaaatttttttttattttttttcctccacactgtttggatgtaaacaaaacaatgcaggattaataactcccccctcttaccaccatcatcaggtttatcactgtatacaccatatcaaatggagattaaaaaagagtattaactgattaatacgaatcaaatgatccagatacgtatgtataacagttattagatgcatgcagactgtttatacaccagatactttatcactatcttccttccattatttcattcttcggttttatttaggattttgaccaaaacgacgtattatttattagaacaataataatctttaaatatagttatcatcgactctggattttcattcttcaatggtttatataatgatgttccctcttgttcgtagatccaaaatttgtaacattctttatctccataaaattcgttgaactcatggtctgggatcaaaatatcgtatcctatattctcgttagattcattctttaactcatagccagtgtctgtttgcctactcttctctcttgatatactttcctcttgaaatggattatctaaatatgtatcaccaaattcattcaataaagtccatgtcaaatacgaatagaaccgactagtcaaagtaacagtatatccacctccaccaagtaaaatgacatgacactgaggaaaccatttcataatcttaataatattcctagttaaccccttaatagtcaactgccattcatggaatttatccccaataattccatctgaaccgcattgtacaataataaattcaggttgaaacagctccatacatggatgaataacattatcagtcaattgatccaggttttcatcatcaaacccatgattcactggtaaagttactgtggtattgcctcttgaatccttcagagatccagaacatggaaaaaacccaatctcatatagatgtaaggatacagtttgaacatttttagaatacaacattgctttctctaccccatctccatgatgaagatcaaaatccaagtatgtaatcttttgaaacccgttttttcttaatctttgaattaataacacaatatcattgaaataacagaaaccactagctttacgtttcattgcatgatgccgtccaccatcccagttaatcccaataaacctatcctgggtgacaatgtctgtaaccggttctaaattaatgtctggaatatctagtaatcttaatgttgcaccaactgtcacttttaagtacaaggaaagaaatgggaatattggacaatctccttctaaattatatagctttttaaactcccaatcattgtaatttgttgcaattctttcatattcatcattttctaaatctgtgtcctcatgagatctttttctttttaaagattctctctcactaattatactcccatctcccttatctatataattattataataccttaaaagatcagaaggtctcatacaaacttgaaccttgtttgctgcattttttttattatatgacaattgtgccatatgcacccattgatcttcatactcagttttattagcccatgtgtagcaattcaatgtttcatttagtagaatattcacataagcagaatcatggaattgacatatctcattcttcgaacagtatggttcactaataatatagtcaaaatgatccaacaaaccatatgcctttaatagaccaaagactaattgagatttgcaacctttattacaaggcagcaaatcactcacctgcgattgaaataaagatgtagatattgcaaatttcactttttgtttcatctaatgatacaatatactcttctaatactctttctccctttcacatcatatcatatcatatcatctcaattttatactatccaatttacaagagaaagattatctttttttttttcttgctttacaatgtctgcatatatatgtacataccctgctatacaaatgccaattaaccagtctgtaatgcaactaaaagcagctgttttccaatccagcacgctggatacatcccctgtgtgtggcatcactgatcttattagtggatataatttactttttctcttctcaaagtctctttttactcgagagaaaaaagctggtaataattttttttttgttagcaggacctttaatttaataccagagattatgccaactgattttataaatgccattctgtgaacaactcttgcgttaaataaatcaataacaaaagcaagtatacaaacatcaaatatatacatacatatatatatatgcgtgtgtatatacgtgtgtaggtatattaccataataacttttctaattcaacacgtatacagtttactgttataataattgacccaataaacagttggtcaccaaaaaaaaatattctaaaaagactaaggaaacagacatggcagtggattcttatatggaaacattgaaccagatggttcaattgtttaaagaatataaacctggatctgtgactttggaaaatattactagactctgccaaactatgggactagaatcttttgttgatgatataagtaacgatttggcaagattatcaaccgcctcaaaaattattgtgattgatattgattttgataagatcaacaataaagtcaaagacgtgaagttggttcttgcctcgaattttgattacttcaattattttatcgacgactatgatcagagcaaaggtgaaagtaataacgtccttttgaattctttaatcttatacaatgatttgaaacagttccataacaatttgcaatttttgaatcttttagatacttactcacaagtggatatagacaattccacatctgcaggtcccacaatgggaaatatttttaatggcgcgaaccatagtagcaacactaataatcacgcaggaagcattggtttttcctttgataatagtaataccaccactaatcctacaaataatggaaattctaataataatattcttagtactggaacaatgaatgattccaatactctgacaaatcaaaatgcgacgaataaaaatggcaaacttgatttattcaaatacttcactgaattaagagaacatacaaccaaatacgtccaaacttataataaaaatctaaacgtcgtagcaaatttaggtaacaatattggtgtgtacattataaaaccaaatagtgaccaaactacaactgacaaaaaatatgtagaaaatggttcaaatattttagctaagattactatacaaaaatctaaaaatcctcaacatcagttatttgaatatatttattctgacgctaccaaaaattggatgaatgaaacaccaaacaacaatatctgtggtgctagtcttattttagaaatatataacgaggatatttatttccctgaaagttttgttactgatgacatgatctatgataattctcctgaaaataccaaagaaaagaatacatatatctcacaattattaaataacgttattataaataccaataatactactgataggatttctaatgaaaaagaaatcgttcttttaaataatttcacaacaaaattaatcaatgtcaaaaaaattgacataagtaacgaaaatttagacttactcagtgatatattgaaatggatagaatggtataatgaagtgttaataccattgtttaatatgcttgaaacaactatcaagggcacaaggaatataaatgaacaaaacaactcattcaattcgcatcgtctgcaccattttcataatcacaacaaaagaaggctatcaaatatcattgttggccccaataatctcccacacacatcaataagacatagaagatcatcatctaagaacaaaaaacccaatttgacagaatctaccatacttaaagaagaaggattacaacaatttaatttacatgatattctatcacaacctgttgtagaagaaacggaattagctttgtcagttaaccccaacaatgaggaagcattaattgttgacgacgatgaatctgataaaatggtaattgatgataatggcatgatgtcttccaataatacttcgataaaccaaagtacactccaatttattctatctgaagataatatggaatttaataatcaactgagatgtagtttgtatgacgacagaaataattgggacatatttttgagagatataaaaaattttatagagtaattgcctcaaaataatacgtgctgttttaataaactatcatatgtttaaaagaaggtctttatatatatacacttatatagtttattattatttcttctaaattcagagacgaaaatagatatacaatatcatatgtttaacaaacagttttcaataaatttacaaagattatatatgagtgttttttaacaaatccacacgcttattatacctttcatataagacttattactttctattttaaatgattaggccatctagttaaaaagggttttaatatccacttaattgctttcaaattttaattaagccaacatagactaaaattattgttgcaaataacaatataagttacaattattcgataaaataataaaattaaaataattaattttatacaaatatcctattttttactttcaataatttgtgaatatataaaaagaaacaaaatttaattctataaataactttatattttttctttctttcaaacttatttattatatttcttaacaacacaatcaatcttaagtataagcggtttatgctagaccaagatattttaaaaaaagcgatatgtaaactacaaattcccagaatatcactttcaataactatttccatttgtgttaaagaaaatgttttgggccaaaagggttacattcgataaaaaagtattatacgaaaagttcagtatttaaagaactgattaaccagtagtccaagatttaataacaaaaactgcatataaagctcaccaatcttagaattatatatcgtgaatagaaattaaactaaaggtaaaagaatataacaatacagcctagtaaaaattacaaataatgtgattctctctatacaagtactatacatcattctaacgtaaccaaatgttttcatctttcttactcatcataattttcatcttcttctacttgtctaactacattttcctttgctgtatttgattctttactgaaatctttctcagatgttgccatgccatcggttgaagatccattctcctgttcaagcttttcttcttcacgtagcttagcttcctcttgtaacttttcaatagcctctgctgttggttttatcaccgtctcttcttccttcttctcctctactccatctttattttcacttatagctgaaatttcctttttttcttctgactggttttgtttagaagtagctactatagaattctcactttcagaattttcaacaggtaccactttttgttctattatagttgtttctgttggtttctctgattccttttctgaagaaacaggtttatctggaacatcattctctttatgctctgttgattgtgatgcttcgactgttgacacaggagttttttccattttattttcctcaacagggacatttggtgtcactttaacactttctgtcatattggcaactgatgttggctgctctgcagccagttgagtgttagaagatgatggagctgtggtagttgctgtatcccgttctgcaacaacttgagattcttcatttttctccctctcttggtcattctctttatcagattctgcttgtttaattctcttcaattcaggttctgattcctttgcagtatcgttattcattaaagaacttactgtgttttgatgataagttggatgttcttcttcattcgacgaagacaccgcagcattgactaaagtgtcgatattactactgccatggacagcatcaatggatctcttttgtggtactacttgtccttgattaggcactggcattatatcatgtttagtagaagtaggttcggaaacattggatgatgcattttgttgaggtaatgtaactaagttacttacaacttgttttggtgattttgtgtcacttacaggagccactactgaagaagcagttacttgtgtttgttcttgtgtcttcacaggtactacaggaagaggagcatttacagttgttggtaataaatcagtttgaatatgtcctgtagtaacttgtgacactggttgtgtaggttttccagcaattggaaccaacttagctggtggagatgcggcattttgtgtgctaggtgtttggtgctgttgctgttgcattgggactgaaattatagatggttgaggatactgttggaattgtgggacgactgacagttggtgtggttggtgttggatgggttgtgattcttgcaatggctgacctccttgctgattctgactcaatgggcctgatggatacatggttgctataggtggtctaacgtttaatggattggtttgatcattcggttgtagtattggttgcaacataacaggctgctgttgctgctgctgttgttgttgttgtgggtcttgtaattgttgttgtaatgctacctgtggaggtgggggtggaggtaattgttgttgctgttgttgctgaatagcttgagacgcattaggattagataattgttgtgtcaaagcctccaatctctttcttatatgaatattttctggatccaatctggctgcttgtttataagcatcaagggcatcagtcaattggttattacaagtttcatacaatgtacccaaatcataccatacctcactgatatatggatttaatctaatagctctcgtgtatgcatccagagcatctctatattgagatatttggtaatataaaacaccaattgaacaccaaaagattggatttcttgaatctctgttaaccgcttgttggaaagcatcatatgcagcagtataatcacttctaaccatatgaacacgacctaaatggtaccatgtggtagcatcagatggatctacttccaaggattttaaaagatagtttagagccttttgtgggtcataaaattgtacattgttcatgccatatagacaacctaactgttgtaacacttttgcatgatgttcattttgtaaaagtacgtgttcataagcctctcttgcaccttgccactcacccatactttccaaaacagatccaagttggaaccaaatgtcccattcttgcaaaggtgcaggtggctgttgtaagatgtatctgaaacattctaaagcttgattccatttcccacgatgcttgtatatgatacctaacctaaagtagatttcattggccttttcaaaatgtggatctaactccagaacttttgcaaaggcttcttctgcataatccaaagacccatatctgtcataaagaataccaatcccatgccataacttaggaacattaggattagacaaatggtataaagcttgttgataagcattataagcacgttgtaaatcgtccaacattaaataacaatgacccaaagttgcccagacgtcagatagttcaggattgatttgcaaagctctttcaaacagttctgcagctttttgaaagatgtctctcgatctatataaatgagctagagaagtcaaagccttcgtagaatttggattatactgtaacgtggcatcatatgccaaagctgcacggtctgtatcaccaacagtctcagccaaagaagcaatggataaccaagtctctgctgtcgactgggtcaatggatcattttcgattgagtccttaccactagcattcgaatcagttttactgctgttaatgttgttgttggagttgttattttttttttttttattattggtattagagttagtcttagtactgctgttactattcatatctttatcagtattatgttgaggattagtatttaatttttccactttattcctattattccttttactactcttattgctatttttagtggtcataatacgtatatgtatacttatatgtatatagagatatttgccaattctaaataatatactatatattcatgaaatatattatagtatatgtatggatagatggttaggaaaatttatatatgtgacttttttccctttatctcttaataatgataataatagtaaataaacaaatatctatctatttatttatttttctatttatttaatattttcttaattagactaattttcaaaataactttttttttatattattagtcttggttactaacttgtagaatgcgattcgatataagaaattcacagaacgttagctagagggaaaacaaagaccaattgaaaaacctaagagcgacttaaatagtaactaaagagtttggccaagcgagtggaacaccaagagactttataacaagcaaagggacactaattggaaaggaaaaaaaggaagacaaagagaaagaaaattgagacgttggggtgaagaaaagaagtatatcctcgttgaatcaagagaccaacaggaaaaaataacaggtctatttattaatttatttttgtttttttttttttttttactttcttgtatttatataaacaggtaaacaggtttatgtaaatattgtttatataaccacctaatcaaactcaaaattaattttagtttgttttatttgttgtttatgttaacaataacaatagaaaaaagaaaaggaaaaagaaaaaaagaaaaaaagaaaaaaaaagaacaagacaaaagacaaaaaacgcaataaaacaaaaagaatgtctcctttttcttttcctttagcttgtgtcttttgtctcatgttgagtatattgttacaatctattgtactggatccaacaataggagagattaaaaaacttcttgaaaattgggaaatttttattaaaacaaaacaatatggcggtaacaaaaactgtgctcgtatgagacaatagaaaaagaaaagacgtaaaatttttcttattttttttttttagagaaaatcttgtattgttattttcgggtttattttcctcaaaaaaaaaaaaacaaaaagaaaaaaagaaaagaaaaaaataaacaaaaactaagaatgggaaaaatgatctcagaatctaattactgcttacggattttacccattgccaaattaccggttactgaacacatggaaaaccatcatatcacacggtcgacaacatacataaacaaaagtgatacatacacatacacttatacataacgtgttaaaaagacgttttctaatatccttttcgtattgtgttcttgtttttgtgctgtacttatttttatgttttgcttatttttttttcctaggtgtaaaaatgagtagcttagtatagtaatacacgttatttttatttttctttaacaatacctactatctattggtcatacaaatacctgtccttctttctaggacttcttgagaccgtaagtaatgtagtagtttttaacatgaaaaaatgttacaaataggtatacacactacgctaaaaaataaataaataaataaggtaagaaagaaagaaattaatagcaattgaggttgagttattcgtactatgtgaatttgaagattgcaaaaatctcttttaaaaactgtaccctattttgctttttttttttttttttttttttttttttttagttttttctaaaaatggatctgtattaacattgaatacaaatggagaaatttaggtgtcgccaccttcaaaacataattagccctacttaaactattgttgtcacaagctttaaatcactttttagaatgttgtataatatacaaaacttttatgaagatatcaattgcttcttcacgtaaaatctacattaattagaaaattacaataggtatttagtcttacttatgtgtactaagtttttgtaacagatcaggcttatctacaaattacaaagagtattggaagagaagtcgtttcttgtctatccaacaatatttctcaataactaaattgtccacctttcgctttctctctacttaccccccccattctgtttcagattcaatgcttgtcatttattgttgtcttttaataataaggtataaaaaaacgaatttttctgtctgagatacctcacacacccttacgtgaaatacaggctatccttgagcataagcctttaaaatatacaaataggttttaataatatattctaaaaataaaaacaagtatatatatatatgtatgtgtatacataactcccgtatcaaatgatcctttacacgttttcttttaagggagattgcaatctttttcgcttttattttgaagacaaaaaaaattaaaaaaaatttccgaaacacaaaagaaaggaggaaggaaaaatggatttcttttgtcttttcacattctcttttgttttcttgtaaaagtgtcttcgtcttttgttctgtgtaccatcctctgcatcattcgacctttgcttaaaagtgggggagggcagaagaaaaatatgaataatatgaatagcacgtatatatatttatgtatacaacatatgttatatctatatgcatatttttatatttagataggtacagcacgagcagttggcaaaaatacaacacaaagcaaataataaagataaatatgctttactgcatagatatatatataaatagatagattgtttgcattaagggaatgagagtatatataggggacataaggtttgtttctgtatattatagatatgtctatccaccataatgaccttaaacccttttctttttaactgatctttgtctatttgaaggcttatttatatttaaaaaagtttttgtcgaatagcaacaattagctatatatatatatatatatatattgctggacgtatggatatcttccacaaaatatggctcattgaaatgtaaaacacatcaatcataaaatgatcaactgatttcttatttgtttctctagttgaatcaatatagttcatcctttattatcttaaaaaaaatgcaacaaagtatatttatagatataattgtatagttagagacctgttggatgttttctcgttttaagcctgtatgttttttgttaaacctggtaattattggtttttactacctttaatcgcatttattccgtggtatggaatgctaattacaatgctggtatgttgggctgcacaaggacatccgatatattggtttatgcatactgaccaatttcctgtctatatatcagatattggtgctaccaatctgagacctctatttattgcatgttctgcttggcaaggtattggttatgtattggtggtatttatggaatttacacaaagatttttgtacctcatgaacccatggttcacataccatgaaagaaatctgatccttgcatcccttcttcttggtatagtgggccaattaggcctgttgttctgtactatttggtcgactgctttgcttcataaagtacatattacaatggtctctatttttataattttcatgttcttatcaattatttgtttaacttcccaatatttgtcaatgggtagacattacgccctaatccattataagtccggaaattcaaatgttttggatagtagagatttaaaatggtggcaatggaaagggtacaaatggaataagtttacaattagcggtcttttcaagttggtttggctaatttgttcagttgtatgggccatttcctttgcctcttttcaagacagtaatgactctatatctgcctgttttgaatggttattggcattttggttgggtttgatctttattattatatctattgacttctatttaggatcaacgtggaagacttccaaatactggtcacagattaactattataatagttattataagtttgaaaaatatactaatgatccaaactgagataatccagtataatatatatattattataaacagttatttgtatagtagtatgtaaagaacataatattgccttttgctatctaagaaagtaaactagagatatatataagcacatatgtagttatatggtgggtgacaaaggcgaaaaagaatggagttgcgagcgaaaaagaaagggtggtactatcgctatagttaaaatacctctttgaaaagactcttttctccatttgcagtttcatcatttttatttaaagaatttacatcgttagaagatgatctaatatatttattttgatcatcatgatcttttattgatccttgagaaaatccactaaaagatggtgaattatcttttaaatcactcgaattactagcatgactttcattttcccagtaattttttttctctgatggtaatgatgatgtgtctgttttgcgtgcaacgactgcagtagtcggttttcttgagctgtaataataggatttttggaatattttcttctcataattcatttttgattctaaattgacattatcttttctaggtttatttttacctagatttctaaaagattgtctattactattaatggaaggatgcgtattcaaaacaccactaacacctgtcactgatctgacagacgcagatgcttcagcaccatatgaactttccttatcaaaactgtgtttagaattatcatatttactttgatacaaatttggacctgtagttattatagttgcctttcctttgttttttgctctttcagctttttgaatccttgtaatatcattaccttctccagcaactacgctgtcatcgtcactatagtcatcaccttttataacattagcatcaccttctttcgcgatatcattctgtcttttaattatctcatactgactataatcactattaaagtcgttatcagcatttttaaacactccatttaatttagaagagacagtattttgattatcatcaatttcatctgattctttaattgattttaaaagagctactttttccttatttttcaataaatttgcttcattagtttttaatttatgttcacgttcaatgatcgtttttttcaaggattctagtttttctctcttcaattcaaccaatctttcctgatcatgtttctctttatctaaacttatcaataaagattcatgcttcttctttgattttgttttccccttatgactaatagatatgatagatgtcaatttctcatgatctgtcttattaatatttctctcccctatgtttttggaggatgcaggtatcttttccaatttcagtctatcatccatttctgatatgttttcatcatgtacttggatctcattttctagatcttgtatttcaatctttattgcttctaattcattttgtaattttgttttgatatcttcattttcatctaaagtttcaaagtaagggtttaacaattctattttatctctatctaatttatcaagatctttagagtgtttcttctgtaaaatagtcaattggtcagtctgcaatttttctaaatgtatttttttatttaataattcagtttctaattcttttgatttttcaacaagttcatttaattgtttttgtttcaaaatcagtttattttccatttctttagaaaaattttgcatatcctcatttattaaattttgattttcttgtctttctgactttatctgcaaatttgtttcattgactaaatcctcgtcatttttatttctaataatttgcaattgcttccatcttttatattcttgtttatatgtagattctctacgatccagttcaatatccaattttctttccatttctgtttttaaatcaattttttcaattagtggtttcacattatgtctcgaaatatcgtcaacatctctatttggtatccaaagtccaccaccagtatatatcttgccccttgttttttctaacgtttgattttccttttctttgtttaattgcatttgtttgcgcgcgtactgaacagcttttatattgtaatccatgttattaaataatacacctttagtagtcaatgaacgaatgttcttatcaattgaattcaatttcgatgttgtgttgcttgaagctagattccaaacttttggagataccataaagttgtaaaattctattttttgtttttccaaatcatgcacatgtttacgttcttgcaataatgaatcgggtagataatatgttgagttcactttatatgcagcatttaatgcatttttgtttcgtaaagttttagtgctctcagattcgggcctaaaccttttattaatcctgatatgtgctttattttctgcactattcaaaactttagataagtttaagttctgatgagaagcagcagcagcgccaacggtgacagtgctggtgatagtagtagtagtagtagtagtagtgggtgattttgctgtggttgtggttatagatgttgtaggaacattaattgattttaaagaatctgagtaagccttacaggccgacttttttgaataacctgtatgagaagtgtttaaatcggttggatgaatcaatttatattgttgactagtattagaatcatgtaaacttctagttgcagcgtttaaggcgtaagcagaagtgaaattatgagagtagtcatacttattgtcaatattatttgggtgggtgttagaggattgaacaaaaacggcagctttctttccaatatccggaacttcatcactgaaagacgaatattgattagctggagaattataatgaccatacttcaagttggtgtaataaatagcttctttacttaaatgatcatttaattcaccaatagagtcgtaataatgatagtagggatgatgaaatgaataggtagaagtagtggatttgcgtaattttatatttttttttaaattccaaattattgatatgttgatcggtattatagtctgttagcttagttttataatgagcagatatcaacgacatgatgttgttatggttgtggaatgtgcaccaatatgtatagacccttctttggtttttttttttttggtttttattattgattctattaattcaattaatgttcctattcaatgatattaaaaaaatggctggatcaaaaatgatgaagtaagaaaaagaaaaagatgtacatattaatatacgtgtttataaataaatgaacgaatcaagttaggcgatgcatatagcaaagaatcgtcagtagaagggataaagaagggctggaattaagaaaagaaaagaaccaaacgaacaatacaatacgatataatattatgaaaaaagggaagagtaaacagagaatagcaaaaagaaaatactgacaatacataatgaataatgaataataatagtaacgattgttgacacgttaatttgaacccttgaacagtttggttcttttcttttcttttcttcttttaattgttgttgtttgaatgctatagttatttgaaataaagggatataggggtgagcaaaagacataaagggtaggaagagaagagaagaggaatgtcagggtacacgtagcagatattgattgttttgggcaatatgtagtgttagatgaattgccctctaatacgtcttgctaattggatatcctttttcatcaaagttatccttttgccatgaattgccaataaatttgcatgttctaataaaccgaccaaataggcttcacttgcctcctgtaatgctaagattgccatagaatgccagtgcaaatgttgattctcatagacaaaattgtctgttatctctttgaccaatttggcaaacggtatcttcgatattagcaaatctgttgactgttggtattttctaatctcgtataacgccaggtcgctaggtctataccttattgtctttgacccttctacatccctatttttaccaactctattctttttccttaattctccacttagccgtagatctgttctattgtaatccctggaatcccctatttttgccgacttgtctaatctattattagtgaagaccctattttcataatcttcatcgttgtattcataatcgtcatatatactgctgtcataatgactattatagtgaatgtcttctgcttcttcctctgcctcttcgtcttcatatgaaaatgattgttgttcttgataatagtcattgtcatatctacggtcattcccttgttcttcctccgctaaataatagtaatcattgtcaatggggttattatcaatgtttttttcattgttcaaatgcagtggcgacggttgctctgtttcataacgtctactgttgtctgtgagtcgataacgaaaatttccgttatgatttttattcttcctcgttctttccaacaaatttattgccctcgcattaattaaatcttggtttgatatgtaatttggcctaatggtgcttaatgaaacagattcgttgtcaaagttattgtcgtctctccactcttctacatcttctacatctgccagatcttctttctctggatgtcgcagtggcctgccaatattagtattagtgttaaatatgctgttgtgatataatgatgtaatggtactattatttgttgaggttggcgagtaatatcgttggctttgcatctttctataacagtttctatgagaagaggcaaaattttgaactttgaaagggtcttaaaatttgatactttgaaatactcaaaacggtactgttcaaataatatatgtgtatatatgtgtatatatttctcgattctctttgatctcttcgtctttttttgtcttcttatacgtttattaattcatttattttgcatctgattgaaaaagttataaatgttttatttgtagtcgctttttgttgtttttcatgtgatttttttttttttttttttttgtataatagattcagacgatgagtatatgggatgcgaaactgaaaaaaaaaaatttaaaataaaaaataaaaaataaaaaataaaaaataaaaaataaaaaataaaaacaagaaaacaagaaaacaagaaaacaagaaaacaagaaaacaagagcaaactgtaatgtaattttcacattgatatagtcgtatattcgaacttatcatactttactacttctttcatatatgttatatatgtcctgtttattgagtgtccacatacatatacatattaaaaaggaaaaagaatcaattaaagtaatattgatagataaatagggatattcacataggtgactttctttgttgattatggctccatttaaattagataacattttaattatttatccaaaatctgaaaccactttggtccagtttggtctaaacgatgaaacttttacggtccctgagttcgaaatcccaactaaaatttacaagtccatagataacaataaccaatatttctcaactcctgaatatagaacatatgaaatttttcccattagaaatggttcaattgttaatctaaatgcttttttacaattcttaaaattggtctatggttcaattttatccaaaattaaaaacgataataggaataatgataataataatagtaataatagtaataataatataatattacctgatttaaccaatataccaattttcataatatccaattattcatggactaattttcaaattgaaaaaatcatacaattttcttttgaacatttgaaattcaataatctatatttactctccaattccttagccacgacatacgcacttatatcccaacctaattcaatagtgatagatatcggagctaatcatacagatattgtgcctattatcgattatatctctttgaaccatcttgcatataaattgaagttcggtgggaaccatattaataaaactttacaaaaactgttaccacaattcaataatgaaactattgaaatcttgaaaaaatctaacatcttcgaagtggtcaatgatgatatgaaaaggttacataacatcggtatcctaagcacaccaaatgatgcttccagtggctttggtgcggaaggtgatgatttattggatggatccttaaacgtggtcgatattgtcacttcaaatcgtgatacaagagaaatcttggctgaaagagaaaaattgaagaatgaaaagcataaaaatgttaaaaacactgaattggaatttaatactttttgggaccaaaatggtaacgagttaccggtcggaaaagaaagatttcaaggttgtgacgatttaatctcaaaaatatcagaaatggtcggatttgtcatgcaaaatgttcaggatatcagtaaagtcaaattagcatgggataatatcatcatcacaggtgcaactagctccatagaagggtttaaagagggtctgttggcacagctgataaaggaccatctaatcattgaacctgaagaggaaagaaataaaagagaaaaagaattgctcgattctttacccaactataaaagaaacagaaataaattcatggattcttcatttgtaccaaacgtcgaatatagtcaagtacccaattctattaaattagccaaatatccagagtatttccccaattggaaaaaacatggatacgctgaaatcccattcctgggtgctcagattgtggctaaacaaatttttactcattcaagagatgtattatatattactagggagagatatgaagaagttggtccttcctgtatctgggatatccaattataaatcaatattgtttatatatctatatatccataccaatatataaataaatcattagaatattttagttgtgacatatactcttaattcaaaacttcatgataaaatctatgaaaagtttcattttgaaaaatatctttttattcacgcacctttcgctagtttgttttaaagatgtatatggtctatatttttatctatattattgtttaatgactttcttatttggcatagttcaagtattctttaatgtcatcaattgtctctccagagtcctgctcttcagagtttaacacagccttgaaattcattatattattagagattggaatacttctatttgtgaaagttaatttatttgttgaactatggtgtcctcccacagaagttccactaatatttgaagaagaattcttcttctctggtgtattgttgatacgaatcattttttttattggtgtgataacttctaaagacgtactggataccactgtttcccttttctccaactgtctttgtggtgacctagataattgatggtccaattctgaaagagaatgtgtatctcttaattgtttgatttcttcataatcttcatcatatgtatctatcttgtttttaacagaaaagagatctaatggatctgtaactaatacaggttcttccaaattagatatcaatgacgtcatatcagaagtactttcaagtttttcaatattgtcaattgtcatatctctactattgttactattattgaacattccattttttgttgctaaatcctttgatttattactaattgatacttttactttatttcgatttttcttgtgccatattttattaatcaagttttttaatgtggaagtttttccttcttgtttctttgtattttttgttagattgggtgacaacacttttatctccttcaacaactcctcaatacatattcgctcatcaggttgtttattcaatagtttatttacaattaaatctgatagttggtctgttttagttattggacaaaaaagtttttttgatattatttggtgatatgtagcaaattcattatctccagaaaagggtaactcattaaacatgatacaatatagcattataccaagagcccatatatcaatcttatacccatcaataactttttgattgttttgttttgataacatatcaaaatgacataattcaggcggtataaatgctggggtgccaacaattttatttaattcacgttgaaaacaatttaagatagtcgaaaacggtatgttcatattttcataatcaaatagaccttgatcaccaggttctattaaactacaaccataatcagatatctttaaagttcctgttctgctgtcaattaaaatattagcaggttttatatctctatggattatcttggattttttcaaaaagaataaaccctgtgcaacatcatgtaatacttttatcacaatatcatgcacagtaatattatttttcgataattggttgttttcgtgttctccatttgaagataatattaatttccactgatttaaaatttcttctttactactcctttgccactgtaattcacccaaatcacagcattcatatattaaccaaatatcggaactattattataatctacacattgaataaaattaactatataaggagataaagatgtatttcttgttaacttttgcatgacaagaatttcccatctaattttaattaaatttaacaccataataatttcatcactggtccatttttcagaccatcccatttgtttccaacgttcttgttgtcttagtatttgattcattccgtatatagcaatattattgttactgtacccactttttgataatcgcttcactgcatatattttattgttggtgttgttgttatttaaactcttacatttataaactgtgccatattgacctcttccaatctttgaaataaattggaaagtggttcgagggtcaccttcaacaatcacttcactagttgtctttttaatttgaggtaaaaatatttgaattaaatcattatatgttgtgataagacttggatcaatgttattgaaagggcctaattgtaaggatgagtttggtaatagagacggtacttttgactgtctttggtggtacatttggtttttataatgatttaaaagctattccacgtagatgttttcttttatttttttgttttaatagagttgtaaaaatacagtattagtattaggttgtatttacactaggtacttaacacaaacataaacaaacaatcatgtatgtatgtgtgtaatgagtatatgtatgtatacttttatctcatcgctgttcttttatttaatatttttcaataacggatttattcaattcgatgaaatgtgcaaggatcttgataaaacagtgaaatagtttccgcaaatactacaactatgtttcaaagttgatgtgagaggtgtttcattagtatgtctatatcattttataaagtcattcatatatatatatatatatatgtttgtgtatatgtataggtatatgtgtgtagattcagtagtatttataataatattgatggattgaaattcctgtattcgttacaaaaaaagactaatctcatgataatagtgtgtacagacaaacaaagaactaatcattagttaaatttattatactgcttacttaaaaaataatgaacacaaagggaaagtcttcctgattggctagtcattatgattagaaatcaccgtgtttcttgtgcgtctttagatgttgagataaattatcacttctactaaacttcttctcacaaagagtacatggaaatggtctttcatttgaatgaacagatctaatatgtctcttaaggtgttcacttcttttaaaagccttagggcattctgcacattggaatggcttctcttcaatattctcatggtctgtggaatgagatccagatgtagggctagctaaaacattcttattgtttgttacagctgaaattgatacatttggtgtcattgctgatgatgatcttaccacaccaacggttgattttcttcttgcattagtgtatgcatgtttatgtatagtagacccacttgaggccattgaggataccgattttcttttagtaatccttgttggatgggtatatggttgtgtatctattgtagggaatgtttcaactttagggattcctttgatagccaatttagctgcaattgaagctttttcagataacatcattgatggtttaataaatttcttttccatcgatgtgtcgttcaattgattaaaaaaatcatttatattattattaatgaatgtttcattgccgatctccggccttcccggtgtagataaaacattattgtttagtgtagaagagttattctcattaatagtatcagtatcaaaaagattgttcttaaatgcagtcatattgaaatcgtcgttatttaaagttggtaatggtatattatcatcatcaatactgaatttgggattaaaaccgatactattattatctactgtcaatatttgatcattatcgttactgtttgcataaaatgaactatttagagactcagatatcaaaggaacagaagttctttgtttatgtgaggtattttgctttggtgaatataaggaattattaaaatctgtagagattgtattactgtcattatttccagtagaattagtggaagtgttatggatagtactgttagatttgctaatatcctttgaaaaatccatattataaccacttaatacctgagtaacattatcattaattggctgtgtggaaatagaattagtgtttacattattattgctatcaatgtttaaaatgttattagaaaactctgtattcgttggatcaatattcatagaagaagaatcaatctcgttagatttctttgggttcatattccaaaaatctacattatgagatatagaatttcttgtacttgtcaaacttgggaatttattatttaccacgatacttgttctcctattaataggtaaagtatcatttccaaatacgtcatctagttgaagaaaatcattttctgtattatattgcaatgttaatggggaggaatcatcaaggaatgaaaatggcttattattattgttgttactatcattactatcagcaatttctgcagtagttgtatccagtatactattattttgttgtttttcggtttcctttgcatctagtaattctaataaatcattcatagcagaaggaccagacaaattattaattggtgaatcattagttaatgttaacccatctatattactatttgttgaaggagcagaactatggattttattattttcattagtagagactgaattgtgatcattatttggatttgaaacagtcttgtccgaagaacttgtagtagaagtaccataattcaatctaaaatttaattttgataaatttgctgtgctattactagcagtgtttaattttgtaatagaagaagagatagaggaagatgatctattagatggattgttaataaggtagttatcttttgaacctgagaaatcattcatttggttatctatagggaaatggatagttgcagcaggatctagtttgttattgttattattactgtcgttgttattgttgtttttagttttagggcttgatatgttattattatctgatttttgtgaaaaaggtggatatagattaccactagtagtttcattattactaaaaggtgtagttgaggagtctgtagccatgggagattcgacagaataatttaaatagtagctataatctggagaattaatatttttattaaacgtggaagtgggtgcagaagtaatatttatatgatcggcttgttggttcatattagtagcattagtagtcttatttctattcttatcagctatgtttgtacttaaattgacgaagttgttgacagttttgtcaatggaaacgggtttatcgcctaatggcctaataggttgttttgtagctgccagcataattgcgtgtatagatatttatatatgtatatatatatatttgtagttttttttttcagaaaaatttattaaataggtcgagaaatatgaatgatttttaatcgggaatcttacaaaatttcctatttgtttttttctcgatagacgtgtgtgttttgttatctaaataaacagaagaagcaggaaaaaaaaaaaagaaaacaaaaattgaacaaaagaaggacaatagaggatagtgtagaaaaccaaaagagaggaaaatctttaaatatctggcttgtattacgttacttgcgaatatcaaattgtccgttgtcactaatgtgtttaaacgagggttatatatatatatatatatatatatatatatggcttagggatagttgtgttgtacaggtgttctattcttttttttttgtgtttttatttttagtttaaattttgcaacagttagagaatggatataactatcaaaatgttagattgacaatagtcgtagttacttgtaatattgatagttgtgaaaatcgttagtatccttgtaaagttcaatcattaagagaggagggggaaagaacaagaaagagagagagctgaataaatcctattaaaagtatcttataaataaagaagataagaaaagtgaatatgagtatagggaaagagtatataactggaggggataggtatcagttaaaaaaaagaaactacaagatgctggatagtacggatctgtttgtttggccgttatgtgcaagatatttagctcaagagctgggcgcggtaaagcaaattgtcttttatattgttacgcgttcttggcagtacgaatatggattaacacttgtttcttgctcttgtgtttctacctttcttacatctttatttaaagctaggttattaatcagactatcttgtattggtaaattatcaacattagatatttaacggatttctctttttgattaattcaatagtttgacgatttattcattcatttgtttctttgtgataataatagcaatatttagagcatattgtttattttttatgaacgctattatctcaaacaaaaagtgtcaagcgatgaaatttgtgtaatatttatgcaattattttttgtctcccctgttttaagacctcctaatatttaattgtacttttttgtttttattatattgtattaatttttttgggctgaattgaaaagaacgaaaaagaaagcacgtaaaatgagttttctacatcctttctaggtttgcaataagatcttcagatttttctgtttatcctgattaaactttatatactatttagattaaggagcggaaaatagaatgaaaccctagttttttttcattttcttttttaaaaaaaatgctgtctagcacacgaaaatacactataatagtttatataaataagtcttacaaaatatagaacattgcaaaagaatagtataataacattaaaatcatcatagttagctaaaatttttcaaaattctgttaacaaccagctttgacttttagttgtcttcatatatgtcgtattaataatctttttgctgctaactaagcccactaattcataaaagaaaattatagaaaatcttgggaaccccataaaaaatatcttcaactatcagaataaaaaaaggaaagatttttattcaccctaaaaaaattaaaataagaaaaaattaaacaatttttttcctatttcattataaaagtctccgtattttcatacaccgggcagagctcttcttactaacaaaagattgctagaaccctattatattacaagaaaactaaagttattgttttatttgaaacaatatgaatagttacgtgtttttatttttattgtggaaattcaataaaccttcagttgattggtcaattttgcattatttatggtgaagtcattttctctgttattatttaactggtgttaaccccgcgggaggagtgttaaaattcacccactgtattgttatggtatagtcaacaatagatattattgttttttctactttttttttatttttttgtattttaccctacaataattttagtaattatttcgtaatttcaaaagtaaccctagttttcgaattcatttgaaaaaaattcgtgcagagtgataatagaatgagtttaggagactaatgaaaaatgaaagaaaagattaattttgcagtctttttttttttttaaaaccttggttgaagttgaagattaccagtaaacatacaagtgctgtaaaactctagattaatccaaacgtaaaacaaaaataaaaaccattaattttgagaagtagttagtttagtaaggtcggtcctcatactttaactatattcgtttatcgctgtttactgatacagcaacccattattgtttatctatttttctacaaatatgcaaggtggtattagaagaaagaaggatttgttacctcgttataagaaaaatggtggttttaataacagaaatagatcatatttgactaccccaatgaaaaaaatattggcatacattggtcttctatgtattgtttatttagtcttgagagtggcttattctgatttaaataaaatcccaacatatgaattagaacgtttagaaaatgataaaactaataacaagaataataataaaaataataataataatgtcaatgttaaatctaataatgaagatactacaattgacgaacttttaaaagatatcaagcaaaatgacaataataacatagtagatcaaatcagtaataataataaagatcctaagaatttggatgaaagaaaaaaaatagcaaaggacaaatttaataatgaagttgctatgcaacaagaaactaaaaacctagaaaatgacttaaaaccacatgtcgatgccaaagatattccaaacaaagggtcaggtagtgttgtggatgaatccgctgttagaatggcacaaaaaaacctaataatataattcatatacacaaactttgcgtgtgttaagtatttatcggtatatattgatttatagagaatattaatatatttataaatgtttgagatgtattgtaatctgaaaattatcattttaaaagccgaaccgtctctttgtgtatacaaacgcaccatatgctagaattatcatacagaggaagatgctgcaaaaccaagttaatgattcgttaaattggcctgggacaataacattcattccccacaaacctgtaattacattcataggcaaaacaatagtacctaggatagtgattttacccaatacatcgttcatatcattattaacttttgtcatatcaatattgatctgtgccaaataattagaatgggatctacttaatagcttttcatagtggtttaatgatgaaaccattgtaataatatgatcttgaatatcatcaagatacattccaatttctgtctgcggcactggatcccattgcccattatatctcttggcaaaacctttaataacatctgctttagcaccaagcaatcgaagaatactcataacacgtttacgacaatctccaatacgacgtaacatatctccttttttcttccacccaattatattagcgttaaaagtagaaatacttgatgaagaacgagtactacgagtgcttctggttgatatagatctgaagtttgaacttttactgcttcttgatgttccagatgataacgtacctgtcgtgtgtcgtgaaaaaatactcttccttcttcttggtggacttcttctactaaataaatgttgtgatgtatcactattatcatcattttcattatccaggtatattatattatcatccgagtctgatgagtctgacgagtctgatgaggaagatgtgtcatcaatttgattcatttttataatcgcatcctcaatatcatagacttcatcttcaatcaattctatcataggcccaaatgcgtctgtaatatcatctattaaggcataggcaatccaatctgatgtaacatttaaataatcctttaatagccttgctcttcttcttacgttaatagggtgtggggtaggtgcaaaatggaatgttaacacaccagtgcggaagacaataatatagacatttagtggctctaattcaccagctcgaggtttatgtctatcacctgatttacgtttaaatttttctctttcttcacgttttttaagtatactctgtctgcgtctccttgtaacactggtgtgattaactgatccatagtcagatttagaagagtatatagatgatcttcttctatttctcctaaataatgaatggaaccatgacacattgttattattcctcttatttccagtgtgtaatgatttatcagaggaatcatcgctgctatcaaaggtttcagatttgaatttttttcgtcttgtatgtttctcagcaacgatatcgaaacttctaaaacatattaaataataatccttaaataattccactttttctcttatttcacccaagaaaatatcttctgtagttaggggatggataccaaatgctttacttaatactttcatttcttcctctgttggattaatcacatctagccaaaatggatggatgtcttccaacgcaattgagggggtcttgcccttaattccacttcctgtaccactattataagtagtgagatttgttccactatggttagatgatatattggttgtaattttgtttagtaccgaatggaccggttgtgattgtggctgtggttgtggttgtgaaagtaaagttgaattgagagttgtgtttaccatattggcatttgatgaattgtgactattcaacgttggattattattttgtggtgaggaaggtgatgtaactttggttgatatagtgtcctgatttaaattatctgggttcatgtatatcgaactgacaaagagatcttcaaatttctgtcctggttgcaacaatccagagatggttggggaatggactgtagcatctaaatccattctaaaataggcaaatctgaaatgttcggggttattagaaattatgtgatgtggatattgaatatttcttcctactaaaaaattgtctctcatggtagaatcaatattagaattcttaagtttgcttaaatttaacggtgtcccagacatatttgtatttctcacaggactatgaggtagttcaccattcagtaatgtagttttaatattactgggtctttgcattaaatgccatggtgctactttctttggtctcagcctaccatttttggataaatgttcagcttcatttacttttttgttttccaattcaggaacgtcaatattagttacaatgggatgagaaaagaaaataccacttttcttactttgtttattgatgcttgtaatatttcctgatttgtttctgttgataatatcattatcatcagtttcttcttcggtctcatcataatgaagatgaaatctttctgcgtcttctaaagcttgtcttctcaatctttcagtttcttctttagagaattcctccaacacagagacatcaggccaaattttttgattatcatttgtagtttcatcttcaaggacaagacaaacgtcatctaatgatgaatgtgaagaggaactacctcttgaagagggccttgaattatattcatcttcttctgaggatgtgtaggatgaaaaacttgatgtggagtcgtattcatcatcttctgcagttaatgatactaaaggatgagtgatatttgaatacttattgccactactattattgtgaaggtgattattattattattactgttactgttactgttactgttactgttattgttactgttactattcgcagtgatagtattttgttgtacatgttgtaataaagcatctacatcgatgactacatcaccttcaagtttttttggattattagtaccgtggatatttttctttttattcttaccacgattatttttattttttttggatgatttcccatgcgaattatatttataggataccaaatggtttggtatctgtgatgattcatcttttgagagggtatgtgtgtgatctatgaaagcgttatgctggtctgtatctctttggatttgtgcgtcatttaaaaggctggaatccatcaacctgtcaccacgttccaaatcataattataaccaaaatctgtatccgattcatgtagcatcccccatgaatccacatggtcgaaatcagacgctaataaatcagtgttgttgttgttaccgccgatattaaaagaagagacccttttacttgaatcaaattgtttgttagaattttttgatctgttcttgtatttatatgtattggatgataacaaaggaacggattcattccgtttttcaccataattagacattttcttattttcttttttttttaaaaaaaaaaatcctctatttgcgtgtgtgtttatgtgtgtatgttcactattttggttcttatggaaatatatttatttcttcttgttcaaaatcagatggcaaagtcatctatcaatttatattcaggtaagttggtttcaatcgttcaatttagttacagttatttagtctcttcattttgaaactgcagctcccattgaaagagattgttcttatgcatagtttagtatataatgattatatatttgttgcttcaatgtatattcccgcattttttgtaaaatcggtttatatttttgttctttgttaatttttttttctttttttttcatttaattattagaaagaaaaagagagggccatacaaaaaaaaaaaaaaaaaaaacagaaaaatgcggaattatgatggttttctcggaataagtttccgttagaatccgcgttgtttgtaagagtgtcaaatatccacgttgcctgttaatgtgagtgtatacgtggcggaagggaaagtgatgggattcagaagatagaaaaaaatagcaatgggtcagtcacactgtatggttacggttaacggttaatggttaatggtgtacgtatgtatgtatgtatgtatgtgtttaacatacaacaaatgatcactttatgcggtcctccccctttatcctcgatcaatctcaatcaaaaaatctatctatctatcaattcattagtctacctatttgtgtatgtatggggtcgtctcttacactggtgtttgtgtttttgtcggttgtatatgaataccggaaggtaagggaaaggtcttgttagtctcttttttttttcatttgttcttataatctctttttttggtttttgtttttttcctccttttttttattgtacgtacagcatatgtattacatatatgttacatatacatttgtatatttgtatctttgtatctttgtatctttgtatattcatatactgaacgaaattatttcaaagaggaagcaaacgttaaaacacaagtattatcgtactttaaaaatattataacgttacataatcaaataagttttattctatcaatctataaagagatatataaaaaaaaaaaagatatcctagagatttataaaaataataataataataataataataaaagcaatcaatttaagagtcaaaagatgagtttatattttactttattatttgcctttttaatattgaaaatgtgcatacttttctttattgtccttccattgccaaacagaatcagaaaattggtttacaacatctggaataagctaagtaacaaacaagaatacagaaccgtatcatatatcctatgggtcattgtcggtttgctatttatagactcatggaaaagagccaatgttccaatacatctacattttcgctctagccgtggggataatgatgtcagcggatccggtagcactttggatgaccctgttacttctattcaggggtttgctactagggcatacaaccagagaaatgtttatatctcgggatttattttgtatttcatggttgttatcccatctattatgagtttgattaaaagattgattaaatatcaagatttgatcgataagaagaatgctgggaaaccagaagaattggacaaattacagacaggtgacaaagatttagatgagttaagagatcagttgagaaagagacaaatctctttggatggattgagaatacagatatcaaattatgaaaaacattttgatgaattggttagaagtaacagtggaaacgaagaagacccggaattaaagaaaacaaattaaactaatattaaacagtgattacataggcatatgtgtatacatatgtttatatctatatctatatatatatccatatctatatatatatatatatatagtcacaagtttctttccttttcataaatatttctaatttcactatctttatttgatttatatttcataaatatcccccatgttccaagaatggtacccatgctagttgccaaataaaaatatggtctagttgaacccttttgtttaactttattaaaagttttctccatgacattaaaatattgtgaactatagaatcttttacaaagagccatcatatgtatatatatactattactactaaatattaacattccaactatatatctactaacatgtatgttattactacattagagcacaagtatatatatgcagctatatatgcatatatatatagttatctagtatggacataagtgtctattagacaatatttacaaagagtgtattaattataatatgtgtgttaagggtaatagttaaacaaacaaacaaacaatgttagaatatatgcatagtgtgtagacacatatgaatacatagacatgccctttattttctgattcttattgttctggcaatagtggtaatcaagatataataaaaagaggggagaaataaacttaaaaaaaaagggtggagaatggccatgtgttttgaaagaaaagaagacattgttgttgttgttgttattgttactgttattgtcatatattgtatgtatacttatagaagatgaatgaagtgtaatgatagcaatagcttacagtacattctgaaagagaaaacagaaattctagattctttaggcttgtttgttgaataataaataacactcggcattgatcacaacgataaactaataacagtgtatatacatgtatacttcattacgttacatcatattatactatactatattatattatattatattatattatattatattattattagatttacatgtaagttttatttgtctatgtcattcattcattcattcattcatagatccatttagcttgattagattcccaattgattaattcttctggtttaaaccaaagagcaatttcacgattagcactttccacagagtcactaccatgacaaacgtttctacctaagtcaatgccaaaatcacctctaatagtaccaggagcagagtctgctggatttgtagcacctaacattactctaccttgcttgacaacattcttaccttcccaacacatggcaacaataggaccggaggacatgaactgagccatctttggataaaatggcttgttgacatgttcagcataatgttgggccaatagctctttcgtggcttgcaccaatttgagaccaactaatttataacctctacgttcgaatctaccaataatgtcagaaactagacccctttggacaccatctggcttgactgcaataaaagttctttcttcagacattgataattgtttgacagattgacttaattgttcgctcattaacttatgcatatatgttatacgtacacttgcacagtgatcaattgatatgattatatttcttttaattagtagtcaaaaatgtacacaaaaggcacgtagtgacaagagatgtcaagagaaaaaaaggggaaggtaaaaaagccaagacaagacgagataagacaaatgagatcaaattcagaatctcttcatttaaatattgtattttttctttgtgtgtgtgtgtgtgtgtgtgtgtactcggttttctgttcttaagaaatagtgtccttcttttttaggacattcatcattgttactatgatgacggcttctggtattattgttgctattattattattattattattattattattattaaaactttttagccttaatgggaaggtaagcggggtggaagtaacaaaaagaattgtatggattttggttggtagtggttaccagaaaagaaaacttccaagttcggcaaaagttgacaggaggaaagtacattggaggaagggaggggaaggtgaggaatgaggagaaaggtgaagattcaaagacgtgtcatacaccgtattttgattggtttttcgacgttttctttttttttttacgcgtttggaggtttaaaaatatggatttccttcgtttacctgaaaaaattaggagtgtgaactatccgcgaacaaattcattactattagatctatattttatgaccatatgtattgactacacataattatatatacagacaatatcctcaatatagttatgtatgtttgtaatatgtatgtatgtatgtatgtatttatgtatctctttagaggagaaacagtaactataacagttttaagacaatttattcataagtggaaaataaaaagttaatacaaaataaaacaaaaatggttacgttctgtaagaataatcattctctttcttttcttcttcgtttatttattagttttcatctatttttatttttcatttattttgtttgattctttctttgtatatgttctctatatgtgtaaaattagtaattttattaaaattgaggttgttgttgtgttgattgaaaatattgttgatacactgggttatttggattgttgtttccattgaccgatgagtctggcttgttactattattatttatcatattgttgttggttggattgtttcccgtggttggttgattgtttgtttggccaacatttggacctgggaaactgtccatagtgaaaggatgtagattctcattactaccctgttgtaattgttgtaattgggctgcactttgaggtggtatttgattagtaggcattgggatttgtcctggctgttgttgttgttgctgttgtgcttgttgttgttgctgaactgttatttgcccttgttgttgtgcatgttgcatagcaacttgatgttgttgaacttgttgctgtgcctgttgtatttgttgtgcttgttgttgtgctgctattctctgtctccgagcctctggatcttcctcctcctcttcctcttcttcttcatcaggagcatttaaacatgcttggatcaaatttctaccctcttgttgggtgacaataggttcaaatttaggcgtgctaaaagtataaactagcccagtttcagagacaaccaacaaaagcacttgagtaccagtcaaaacagacaattcaaaggctttcttcatgataccatgtttacgcttagagaaagtgacatgtcgtcttgttttattttcaataaattttatttcgatttttctcctttctttaccattgccatttgtgcttccagcatcactgacgtcgttgttgttgactattggattttctgaatttaatgaggttgcacttggtgatagtgacacggctggtttgatatcttggtccgacattcttgtttttatttatttgtttagttatctatctatctatctatctattgtgtttttattcagaataaattaatggagttgtaaattcactaaaaaaaaaaaaaagaaagaaatcaataaaaatttgatcttggtataacttgtggtacaatcagtcttcgaacaggttgtttcgtcttgacaagactgaaaaaatgaggggaataaacaataattaatggtggttttaataagtaatcaagagaaagacgacaataaaggtaaacagagccaaatatggcttttaaaataattgataacgagaaaaggaaaaaaaaccaaaacaagataccaaattgtttaaaaaggaaaattgggtaaaaagggggaatggtgatgtgtgatatttacacaaaaaaaaaatcttttttttaataactggaagaaaaaaatttttcaaggaatttacgtgaagaaaagttaagttttcctttttcaacagaatttttctaaaaagggctcgtatttatataattttctgaaacgggaaatattactttttttggattgcattgtggaggaaaagaaaagaaggggggagaaaagaaaagccaaaagaaacacactaattagggtatggcagccctgtgtgattaacaaaaaaaaacattaatggagaaaaacatacgtttattttttcctttttctttcacaatttcttgttgttgctgttctttatttagggttaacaaaataattatctgtttttttcttcgaaataagcctcacttatactgtcactaaggcaccgtaaatgagggttttgtataagtaaagagaaaaaagtagtttattatttcatttgatcattcctgtgacatcaatatggatgtaacaaaagggataagtatattttaatattcataagtataggtttatgtgtgccttttattttgatagacattataggaataataaatatcctggatatctttatttgataaaaacattgatttgtttataatgtatgctttttcttttgcttttatttttgtttttaattttttttctattttttttgaattttatgatatatctgtatatatagtgaacgtgtttcttcttacttcgcttatatattttatatacttgtctccttttaacctatacatttttaagagtcgttaccttaattatacattttgcggtaaaaaaaaaaatacaagatggaattaagctctcatatgagaaacaatgatacgctaaattaagactaaacaagattctattttggaaaaaaaatgcagtatctacctatttaaaaacattgaaaaaaacctttgctgcattatgtgggaggttaaagtccctactataaacagctagatattccttggtcaaaaagtgttcattttatcagtaattactaatatttccatcgaaattttttaaaaaaaaataggcaagttaagcttatagtaaatgattataactcttggttattactttccatgtagtatatttaagctatattatatacagggagtagccgatataaataggtatatagaaaaaacaataggatagtctttggttaaaaggttggtaagatcgttatagtaacattgggacaatttatgtcacaaatcagggttaataaaatactttcgttacccaaattccgaacttatcaagaattgtatatgtaaaaaaaaaacatattacgtacaaaatgacaaaatatatatatcacaatgtaaaaaccaagaagaaaatgccatctcctggaatcgaaccagggtttcatcggccacaacgatgtgtactaaccactatactaagatggccaaacttgtcgaatattgttgtagaatagaatagtgattaccatgattagagaattggggtgcagttctaattcactagtgtatctaaattaatgtaataaattttagggtttaaatcagtcagatcattaatttactaatctgaataattgatcgagcttcagaaaacacataaaaggacaacgttttttggagataaaagatcatcttccataaccgttttttgtaaataatctatatattgtataaaaacataaatagaaaaacaagcaataatccttaattctcctatatataacgttcttatatatttgttattgcccttactattcgttcaatagtcctgttaaagaattagtcctaagtccaaactataacagatgttgttagagaataaaaaagttattaccatcaagattacataagatcctgaatgaatctagaactatttattgttttaataagccatacacgtgctacaacattagctgctgcataataaaaaagattagttccattaagattacataagattttgacaaatctagaatttacctattgttttaataagtcacacgtgtattactaataaccataataattgtaccatttatcagtagtgcacccaattaccataactagtgaattggggtacagttactaattcactagtgtacctgaattagtgtaataaaatttagggtttggatcactaagctcattgctggaaaataagagtttattactgtcatttccataagaattatttttaatttgttgaaatatgattagagttatgtttgataatctaaattcatcgtactaagtgatcaaaagctatgaaaatttatattaaagaagattcgaagataaaatgagtatactgtataatatcgtatcttgtatattacttatgtagaaagaaaacaactaagcaatacaataacaatttatagtaccattaattttcttctataaataacaataaaacttataataccaccaatatcctattgtaagttatattatcttattatattagtttaaaatgaactctactagaatttttgattccgaagccttgcgtcaacttaattagtttttttgtatattatgtggtgtacggatgtaccttaatatcaggaagacattttatttttcaccaaatatgcttttcagagatttgaagaaaaatgaaaaactttaaaagaaaggtcaaaatgaatgaaagaatatatactgtatacactatataataagtatatacatgtatttagtacacaatacaacaaacatctataacttaataatgtttaccattaccatatacgctgaaggctccaaattccaacaaataggaatttatgatctttcctaatatcatatgtaatttctttttttgtaaataatttatatattatattaaagaatagtgaataaatatataagttcaatagctgttaatatataagattgcataataattgcttgacccctgtaacaattcctgtttttaatatccgattgatatcatttgcgcttcttgactaaccaataaactaaagattatttgcatattacaacggttataagaaaaactatgatcagcattttatcatttagtatcttataaaatctcattagttcctctattttgttttataacaccataaatcagcaatttttgtgctaatcactatgtttttttcatttatctataatagatgttacatgttaatgctttgtaaatgtaagagttattacaagtagcatactaaaatatggatattaattatatacataaatacttacaaactatataattgattaatgctaattaataaatagttgatcttagttattcgtcttattctttctctaggtggaacatattagatagaatattaatgctaatgctgataattacttctggcaccatctctcaataatcaaaggtctcttaaataagcttcgtggtgatctgccacgcatgttaatcctacgattgtttgttcaaatacattcacatccttggacctagagttttgaccttttcaaatccgtcacttcgatatttggcatcatctgcagactaagtattccagggttttcaattatggttccttacaaaaaaactttttttatttatattctaaaaattaaaaaaaataaacaattaataaaaaaaaataacaaaatttaagatgcataaagtaaacaaattattatttttttatcttattgcaatcagtgtatagatacacatttatgacattagtaaacacaaaaagcatgtcaattaactaacataagagctaattatatagtatttaaagaaaaaattcttgttctctacatataatgtataagaggaagcacgaatatatacagtataacataatagaaaatgattatgaagaaagatagccaaaaacaaatatacgtagaatcatataagtatcacttaaatgtttgcttgaacgattgttacagccaaatatgtaacagtcagtaagatagtggatttaaatgaaattttctagaaagttatatctataacaaatcttttttggggtgatctttgcctattgggcgtgctggaataattcatatattcaaatttttattattctgatgctatattgtacaaattcacttaaaagaactatagtaaatcaataatataatttgtataatagtagtaataataatactaagtatactcaaacgaactttcatattactgagaagcttaacagcctaaataattaggattatttagtaaattttctatataaatctttgagtgtacaattaagctatcgtaaatactacatatagtatcaacaataaattcaaaaagcaaactataaaaaacaactaggatgtagaaacaacataacataaatattaccataatattttgttaacgatgatttaaaatatcaagtaacaactatgaactatggaaaatgcaatatttgataatcaagtgaatatttataacaaacatataaaaactcagtgaatattatgatgaggtataccatttctatattaagtcaataagagatattaattagaatattaaaaatcgtattttaagagatgtatcctgcacaatgaaaatgcaaaaaaatttattaaaatcacaatttaataactaggttaccacatttggaaaaacataaacggtattatgaaacaaagtagtaatgatattatcgaaaggatcctttgaaatttaaccggatagatatcattttgataatatacataaaaaattgtgcgtaatatagcttttaaatgtaattttttaccacattttagatttataactttaattttcttttataattcttgtacatcagtttgctatatatcttatttataactatttaaataacatataataacacaacagtaaatttaaactatacaacaacaatattatcaactgtgaatatgtatgtccctgactttggatcatagctttcaaagtgattcaatggaatatttttcaatgtctgaatatgttttttgaccattggatggtttgaatccctgataggttctctagtacctttagtatatggatagcagttaaataatgtcacacgtgctgaaacattgatacctgtattaggttctggtttaacagatgaattttcatatgctgagaaggaacggttttgaaaattaatgatagaaccacaaagagaagttaaaggaatgttagataaatccacacattttaaaaattgaatttttccataatctttatgacctatcactaaattagatattttacgcaaagccactaaatctgtattttttaacgtttctaaagatggtgaaatataatatccatcatcagtaaaagatacatcatcatttaacactactggtagttttctgtgttttgtgtcatctatagattcaatagatgatgctggtgtaattggagttttgggcaatggaatagatatgatggattctgatttgtccttatcagaagaagcttcactttgagcacgactataaagattattaccggattctgactttgagtcattcacagcaaaggatattcttttgatggaatcttcatcaccagtagaaggtaaattactagctgtatttctcttaataatcaaatttttaaaatgtgctttatctggattaaataataatttattactatttcccgaagttatagtagatcctgaaatcgataaggatactgcatcattggtgaaattagaaaagctgttattattagttgcagtatctgaaatggacaaacttgcattagccaataatttcttagatgcaaataatgacttgacagcttgtctacgcagagggtatattctattttttctactgatatcaatatttaacactctatctgacccagattcttgctgtgtaatagaaggtggaatattgattttggtaaaaagactctcatcaatagttgatgcagatgaagttacagaattcccaccaatgtttgtaatttgattttgttgtaataaagaaggttgttgagtgagggcaccccctgtattcaatggattagttgtcttcatctgactaccaaaaagacctgttgatggttgttgggtggtgcctaactttgtgctatttgttgagagaagacctcctgtttgaccaattggcttacttccaaataatcctgtggagggcgcgttatttccaaaacctaaagaggttgtattgatgttagcattaacattattactgctggatgaaaataaacctgttccatttgttgaagcagcaacattgttgttgttgatattcgaactgaacaaaccagtgctaccagtatttgcagaagcattatttgtagctgcagacgtatttccaaataaagatgtactaccttggggtttattgccaaataatctagaattggaagaattttggaacaaattattattagtattacttgaaccaaataaccccccagtggttgatgtagaaggtttattaccaaacaaaccaccagatgaagcagtattacttaatcctgttgcacttgagttgccaaataagccaccagatttttgttgttgagaattattttgaccaaatagacctcctgaagaaaaattttgagtagtattttgactaaataaaccacctccaattgtattatttggttttgcgccaaacaaccctgaactctgcatattattattattattattattattattatccatgctattattttggccaaagaggcccgtgcctgtttgatttttagtagcctgattaaataatccattgctctgctgttgatttgattgtccaaacaatccattattttgttgcatgttattattattttgtccaaaaagactgttattttgattttgttggttttgttgtccaaacagaccaccaccttgttgtgtattattattttgtccaaacaaaccaccgcccataggtttattctgttggccaaacattccagagccactgttagtattactattaacgtttgcattattaccaaacatactattttgttgtgtattttgaccaaaaatattattagaagtactattattttgaccaaataggcttccagttaccattttgttttgttgaccaaataaagatgtgcctgtattactactactactattattattattattgcttccgaacacattattagctgtgttaaagttattgttattttggccaaataaccctccagtattaccattattattattattttgtccaaacatgttgttgttactgttattactattctgcccaaacataccattattattagtttgtccgaataaccctcctgaactacccatatttggtttattaccaaacaaccctcctgaagacatcatgttattgttgttatttccaaataggccgctactattttgttgagaattagatccaaataaaccattattattactattattattgctgttgttgttggtactgtttccaaacatattagatgtattattttgtgactgaccaaatgagttaacattctgttgattaccaaacaaacccatcccactggaagtattattgttagtattgttgttattattgccaaagagagacccattagacattccagatttactgaaagaaccaaaagaattagttgtgttattaacctggttcattccacctccgaataatccgccagttgatgagttattgttattgttattattcagtgtaccaaatggagaattattttgagtttggttcgacccaaataatccaccttgaggtctattcatattattgccaaacattgagccaccaccgttgttattattagtttgcgtaaatccaccaaatccagattgtgcagtgttattattaataccattattattattaggattaccaaaaagcgaattattttgaacaccaaatgtgctatttgtactggatgctgcaccaaaaggctgggatctgctaaacattgaatttgaattgtttgaaaacattacgagcacaatctactatagtgtatgatataattttggagaataagtagagatgaaaataggtgaaaaaaaaaaatgtgaacgttttattctaaagaaaaaatagtagattgcaatggtacaccgtcagattacttagtccttgacaataaacaagcaagtgttattaaaaaaatatgtctactttgtgatatatggagtttctttctttttattttttttttttctcttttttgtcgatgtgtatttttcactcagatcatctgaagagtttcaatgattaaaatgggttttctttaatttttttttgtttatccatttttttttttccatcaataatattttataaacaagaaaaaaagaaaagtttttaagttcaccaaaaagaaacgtgtagaatgatatatggactaaagaagaaaaacgtttaaatatgaagactctccaagcaagtgtaaaagaaatacactatttccaacaacaattcatcgagcataatgtattttatatatgcatactcggatccatttagttggagaataatataaaccttatttaaatccataatattctcctatagatgaaaaaaagatgctatatattatgttagattatattatacataaatataaaaacaaagacttataaaaagtaaataaaaatgcaaatattgtgttgaatgtttgtttctcatatagtcattaagacaaaaaagaaaaaacgaatgaaaaaacaggaactagagatatgcgtatgtgattaggaatattattatcagtattatcttgtttttcttattaattaattattcattttttttttaaaaaaaaacaaacaaaaagcaaaaagaaaggaaaaaaagtcaaggataaaaaagattctaaaggattcaaagctttttcatcttttgagtgatttcacttaataggttccagccttgtaaaggaacaggttctagggaaccagagtttaaatccaccaccatatcttcttcgtcatcatcgttgtattcttcctcatcagaagatgtgaaatggttataattgacattagcgtccattgtgtcttgtcttatattattgtactgttttgatttagttgggaataagtaggctggatttgtgcttgtattggcagaagtccaaactatagagtgcatagattgataattcatagacattttatatcactttattatttatatgtattcagaataacacgggtattatctcaataggatcgatagaatacttgaatatgtagttgcttctatttgcttgactaccagaaaacaacaaaaagatgaaaaagaggaaggatacaggtgtcaaaagactaacaacccaagtggaatggatgttaatagtagcattacacatggttagtatatctatttatatatatattttgcaagttttagtatctttaacaagattaaataacttgtgtttatctagctaacatatgtaaatgtgtcctgtttatgtccacatgcacacttttgacagaatactgggccttattattattattatgattattgttattgttattattatagtttgctaagtgtggtattcttttatttctttttttcccgaccatttgaaacaaaagacaaaatgaaatgaaatgaaaaaggtgccacaaattgccacaaataacagcagtaacaaagagtgcaagggacaaaactgtggaaaatagaagcaatgcccgaatttctcttttcctctctctttctctgcgacagaaacgaagaattgaagcggggggggggggggaaggaggatgagacgaagttgtgcaacgactaacaagaaacaaaaaacaagaaacaagaacaaggaccacaatacatacaacaaaagcacagtgggcacgtccaaaagaaaaacggccgaaattattcacacactgtgtcgtgctcttttttgtttttgtttttgtttttgtttgattctttgccttgtcttgtgtttgttttcacaaaactgtgaagttctattgtgtgaggtatatgaatgtgtggaagtgtgtcatgggtgcatgggtgtgttgaataaaacaacaagttgtcagaaggtatccgcttaaaaaacaaaaaaagtcttcactccatcggtcacctcaattctttttttttctttttttcctttttttctttttctttcttttttccctttttgtttatactattagtgataataacctaacccaacatcgataattctgtatggctaacatatgctatttaaaccaaatttatctatattatacattattaaatacacacacacacaaacaactatatatataaacgtatatacttgattcacctatgtagtccataaacgtgctgtgttgtctgcacctgcggtaaataaccatgcttctcttggatgccaaatagcatcaagtacaccaagactgttaaccactttatgtccggtcaatttcttcaaaggaacaatcaatgggttcttcatcatatcatcgtatactgtcgcatggaaaatatgtatagtaccatcatctgctgatgaactaaatagtggcaatctcttatggaatgaaatatctcttactgccttttcatgatatcttaacgtcttgtatggtgtactagataaatccaaatcatgccataatactcttttgtcaaatgaagatgcaatcaaattgtctcctcttggatggatatcaatcttagatagccaacgggcacctggtaacaatttcttgactagtatctgttgtgataaatcatagattctgatatatctctgggaacatacaaacaattgtggcttgaatggatggaatttagcatccataataatacctttcgactttctaaatggcgattgagttagatgcttcgataattgatggatcaaaactgatgtatttccagattcaggttgcactgtcacaaaataatcaccctttctatgccatgacaaccttttcactgtctttttacaagtgatcgtaatacatatatccttctctgtctgtctctgacctggtttattccattgtacaacggtcttctttacagatgtcgtctctttggcatcttcctcctcatcactctcatcaccaactaaattggatttctttttcataccaaacttatcaaatccaaacccattttcaatctttgtcctaccattattttcaatatcaaagccaaagataggtggcacaatcaaatggatttgctcaccaactgccaccgcaaggatacctgtacttggatctggattccactcaatacattcaatgtgatcctccgaattctcctcttcttcttctataaaattcaccttatacacctctctaccggtcagaatttcccagactctaactgtaccatcatctgacccggtagccaaccatagaccagatggatcaatagataaagtacgtatcttacccttatgaccattgtatatagtagaacaacggattggaaatggtcttaaatcctttggcgaaggtaattctgggattagtgattccggatcgatattcaatttgtttttacgcacacgtggtgccaaatataaatcaagtgatctttcaaatctttctctaatcgattcagtataacctgggacttttcttaaagaatcatatttttgtggtacaaaatttctttctctttcaccgatctcagtgttttcccactctttcttttcttcttctgtcaataaatattctgctggtgggttataactctcctcatttgttggtggaggtaattttggtgcccttagattcattacatgatcgtttgtctccacagagtccccccatagatcgaaattacgatttgctgcttcctcttcctctttcatctctttcaatttctttggtgggatgatacgtccttccctaatagctctaacaatcttcattattctctttgcctcatgttttgatggaacaaatcttctctttggttcaggaatggctgtcaatggcataacttcttcgtgtctggtaaaccaatcaattaatggctcataaggatcaatagaatcgtctgtttgttcatttttttgaattttagcgatcaactccaattcctcctcagatatattcaaacttgcaccagagttcttgtcaagtaaaccagtccaaccctcaggtaaatcaatagtctccagaagttgatccaaagctgaccccctagcaggtctcatgattctcttaccattaatgtcgtaaccaatatgaggcatctcatcataagcagataatggaatgttaccaattgtgttataggtctccacgtcactatcatcactgtcgtaaacaggattgatctctggctttatgattcttggttgaccatctgaatacttggtataaatatttggatcagcaatagtttttaatttcattccagaaagcttatctgtaagagacttatcatcatctgcatcagaaaaatcagatgtattgtattctttatcgtctgatccttcttgggctgctagtaacttgtttagttctgcatcagaatcttcatcttcatcctcttcttcattgtcattcttgtttttattagaatcttccttttttgttttcttttgtttttcaccctcttcatcatcatcagaaaggatacgctcttcaactgcagaagtatattcttcgtcgtcattaccatcagcatcactatcactatcactatcttgagcatccaataaaccatcaaccatcaaatcttcagcagcatctgatgtattatcttcacgttcctcattgctcctttttttagatgaggtatcttttatagttgtctgatctgctttcattttgactgtattttacctgaggacatatactaattgaaaagaactaaaacttggtaggcaagtcactctaaacaacccctcaaaagccaagattgtatttataaaagaattgacagtcttctctttactcaactcatcgaataatttatttttcatttcaaaaatttttcttagtccttacaaaaaaaaagagttaaaagtaaaaaataaaaaaaaatttttttcaagaaaacccaaacacctttctagctattataaatcttatgctatagaatagatgatgcaccatttaaacttaaatgcaagtaatgtaagaaatatccttcaatacgagatcagatataaatattgacatatagccagataaatactaacttgtatagagataatattgcatatgtgattgcttcaatttagataaaatagtagttgtttcgtcttttctctttcaactttgaaaattacaagtttctactattaatttagccaattcttctaaatattttttatctatttctccaaacccgttatagtctaagcaatctaaatcaataacacctaaagttttgccttcagaagagataattgggaccactatttcagataaagtttcgccatcgcatgcaatgtgttcaggaaatttattcacatccataaccacttgggtctcctgtgtagatgctgcagtaccacatacacctttaccaaaggctatggcttgacaagcaactttaccttggaatggacctaatagcagctcatcctccttatcctttctagtaatataaaacccactccaatttatattaacattcagggatgtgtatgcataccaaagcaatgaggaagcattggacaaattacagacccaattatcctgtccctcactgagactcttatatgactgtatcaacatttttaaaacttcttctctatcatttccaccttcaaactgtgtgtaatcagcatgatgttttccgtcaatttgaaccattttcttagtaattctttctttcttgagtaagatttatccttctaatagggaagattttttagttaaaatgttttacacatttagtttactgaaaattgagatatttctatgaagttgaattaactaaagaatttctccttcaatagtatctaatctatgcaactgctttcttccaattgcgtgctattttttctctttcttctacttttacaccgatctgttcgactagaatcatcataatgttattattccttattatcctgaagaaaaagaaaagaagattaaaaaaacacaaaaatttatgcggaattttttgtattccaccctacttaaacaatagtctctagtacagaaataagggagagattgattattgaaaaacagaaaaaagcttaaatgaagagaattggcaggtttttctttacatttctactaattaacttcggaattcatataaaaactaaatgggaataactgaacaacacacatttctgatgtaatcagtcatatatatttttaccatgtttataagagatacaggtatacattacgagaaatatactcctctaaaaactaaatgaataaaataaccaattcttagttgtcgttctttgtatacagacagatcaagcatactctatatacagaataacatagataagccaatttacagattattaacaaggatatctaaatagtaaatccccccaaaattggctattaacactctgtattatatttgacagaaaagatctccctaagtagatgttcttgatcatgtaataattctaatttttgattatagatgcagaaatttaaatactttaaaataaaagagataagtctagttataggattcaaaagacatatgtacatatattccatttcttttgccctctatccatatcattgtccaaatcgtcttatagtaacctcttgatatacaagtctatatcacgtgtttataatactgcaaataagctttttttgaataacaacatattacagaaaattctacaaaacaaattggacaatgaatgctattaatattcccttaaactcttctttttgaaaaattttacaaaaaaaactctgatatcagaaatataatgaaattatggagaactaatacaaacatgtggagtaggaggtaacaaagagataagaagaagaagccaaccaagaataacaaagattaactgtgtcagttaaatatattatacatagcacttggttcatattagttacgttaactcaactctttttctaacgatatatttaaatatatacaaagagtctgtatgctacatttattcgagttaattaacagttgtcacaatttcataaccaaaaaaaagttatcacaaaaaatcatatttgaataccatttcgtattacatgatattttatcggaaatcttgaaaaaaatgaaacggacaggaattgaacctgcaacccttcgattgcaatctttccactcaaaccaggaattaactggagtcgaaagctctaccattgagccaccgcttcatcttcgaaagctgttgtggaatagaatagttataaccatcaagattacataagatcctgaatgaatctagaaccaattagtgtattaataagccatacatgtgctacaacattagatgctgcataataaaaagattggattacataagatcttggcaaatctagaatttacctattgttttattaagtcccacgtgtattactaatcaccatgattagagaattgggatgcagtcctaatccagtagtgcacctaaattaatataataaattttagggtttgaatcagtcaagtcattaatgtagtaatctgaataatcgatcgagctccagaaaacatataaaaggacaacgttttcaggagataaaagatcatcttccatgatcgtttcttgtaaataatttatatattatgtataaacaaaatagaacaagcaagtaacaagtcaagtaacttcgaataagtacattagctcgatataagccgcttaatatataagaccgttttagtaattatactatcgactatagttgattactgtctcgattatttgaattactattaatattatttgcgcttccctggaatacacaaagaacttcaccataccatactacaacaaaagctgttgtggaatagaatagttataaccatcaagattacataagatcctgaatgaatctaaaactatttattgtattaataagccatacacgtgttacaacattagatgctgcataataaagagattagattacataagattttggcaactctagaatttacctattgtttttgttagaatttggagccttctgcatccatggtaatggtagacatcattaagttatagatgtctgttgtgttttgtactaaatacatgtatatacttattatatagtgtatacagtatacattcttgtatttacttcaagtttttttttaaaaattttcatttcttttcaaatcttcgaaaaacatacttggtgaaaaataaaatgtcttcctgatattatgatacatccgtacatcacataatatacagaaaaattaattaaaaataattcttgtggaaatgacagtaataaattctcattttccaacaaaaactgttaaagttatgaaaaaagattcattgatactattatttaaacagcataaatttttactttgttaattactatttcttgaactgattaatagtgttgacttcctggagataatattccgtaaattcttgattttctagacactcatcatctggagcaacatgaattaacaagatttatgacgttctgttcggaccacagagtacatcttaggtgctaatcactaacactaatcttgatgtcatttacagtaatttctgacctcgaacaagatcacttcttagaaaaaggtacttacgacaataatctcttactatatttcataatttttttaaaatgtttcacaaaagtacataagaaagtattatacaacaaacaatagtttacaaaacactaaaataaaccttcaataaaaacacaacaatgcccccactatatattgtaacagtgctgactaaaattttttaagtgtaatgaaaatgttcacataaaaactataaaaaagaatgatcggattgataatcaattatacctgaaataattatgatgtataaatatatatgtatatttatttgtctacttaattattacattttataatataatataaataaaaaaatcataattcatcatgaataatatcttcagaagttggagtctcaatggtaaatgatatcctgctagaaaattctgaagaaaccacattagaatatgaaatattagacgactggaactgtgcaatagtagcattaatatttaacgaattctcctgttccaacttctttttctctttttctaattttcttgtataggcacgtacttgcctatgatacagagtttttaatttatttagacggtattcatcaacagatatcaaaatattcgatttctctgcagaagtcaacagtctatcaaagtctacctttaaatcgtacaattctaaaagagataacttatcaaaaacctttttatttgatagcaacttttgaattatctgttgtgtttcatttaaagtgataacagtttcattaaaatcggtaaaagacttcattaaatgtttaggtaattcaatcttactatattcttctgtaacgttgaaaggtattttttcagaaattgtttcaatgaataagtcgaatttctctttagaaatctttttttgaacttcaaatgattcaaatatatcttcggatatttctaataatctttcaaattggtctcttcccagtggttcttcaagggcctttaaatacttttcaatttgttttttcaatgtttcaacctttttcttcttcttattaattacagttttggtagcatcatctgaatcatcttctaaccattcaaggtattctgaaacaagattatttaattctgttaattgatcctttggtgcattagagattacttcatcttctgttaagaaatttctaatttcatataaactactttcaaaagtatttcttgcttcttgcaattggaacctctttttatctttatcatcaaaagctttgatacgtttaatatgtttaattctatccttgtacgaaaaaggttctataatagaccctgtttcctcaaaagtaacatcaattggtgacttaaacttacgtttaataatcccacttgccgtagtaatgggagattcatcaccaccgcttgtgcttcgcttttctggatttctttcagtgtcttttttcaaacaagtagctctaacatttttgacagataatgttcttatttcatttaaaaaaaacgtaatattatattctataccatatgggcaaatcttagaatcaaacattttgtcattatcaatagaaatatcacttaaagttgaaccattttctttggacgttatattaattcttcttacatcaccattttcagtaaccacgaatgatttctctattgggtaaatagtacctttagggaataaaatatgatcaaatttacctgtagagtttttgaactcaacagaataatcatagattgaacgttcgataacattcaatggttttgttttaaatgcctggaacaattgaacacctcttagagaaacaccagaaacagctgattcatctgcattaacatttttcaaaattttatctatatcaaacatttcgtttaaacatttttgaacaaatggaagacgagttgatccacctgctagaattataccattcaactcagacaatgtgaccaaatcagtactattattgacttgagattctaaggcatctgttattggatttattaagtactttttaaatgattgcaagttggattcgaactcttctctagtaatttcaacattaaaatcgatatcatcaattatggattcaatagtacctgatgcatcagtattagcacttaatactagtttaatcttttctgccaattgattaatcttagctaaagatttgggatttgtttccagttgatcagcagtaatagaactattgtattttgctaaaaatttttcctttatcatatttgataataggagagtaaaatcagagccaccaataatagaaaacccataaccttttgtttcaattgttattggatcattataatcacttggattagacagtttaatcaaagtggtcttaacagaaccactaccaatatcataaatcataaaattataatctttacctggttctaaatttctttgttgtttatacgcaaaatttaaagcaacagacaaaccatcactgactaaatatgcaccatatgcacgatcaataaaagaactagcatcgatgagggccatacgttgtctttgatcaaaaaaatctggtactgtcataacaaatttatccacataatctttacccgtacgatcattttctttcaatagagaattggatctgtgtgtaatttcttgtaaattcatagccactaattcttcgatagcatatgatacaccatctatagcaattgctaaactgtttctatctgtagtagtgacattaacaccaggatgttttaatatataattatcaataatttcagtattgttaatagtcttacctaacaagggtttcaaatttaaagctatattatgtggaaatcttgtttccaaagaaccaatggaattaccataggtacgctcaatatcctctactttcttggatgtcccatccttagatggcaattttttaatagctaaaccggataaatcttttcttttggcttctggtgtcaaaaccaattctaatggagcatatggtgataccagcattgccttaataaattgttgcccataatctatccccaagactgctgagagaacagggcaaaaaactgtgaaagaccataataccacccacaatattttattccgttgcatgatatcgtgtgtatctgttcgccacctcacactttgtatgtatatatctattaactgattacttgttattatatattgagttacacatatatatacatgcgaaatagttacactacacgtgtcctcaaaaattgtaattattttatatatatcaaattttccagtttctctgtgcaaataaagtcgtttctagaaatgtgaacaaaagaaaattttagagatgagatatggaaaattagcaaagaccacaacttcaatacgatggtttcctgtcaatagttatacatacatgtactaattatatcaagaagattaaaatagtatatatatatatatctttatctgtatgtttatacgtatgtgtatgtatatatgtatacgtttttatgtatctagggatagcaataacaagtgtgaaatataggaagtaatttattagcaaataatgagtgaaaacgaaaagactttagaagaattaaggttaaaaattctttcatctattggaaaatccagtgatactaaaagtactactactgttgttacccccactaccgttgccacagataacaatcaaatcaagagcaataagcgtaacttaccaccatctcaactttctagtgacacatataaatcttctacaaagaaatacaaacctgaattaagaaacagtaatgtgacaaaaccatacattccagactacctcccaacagtgacgcacaattatacttctaaggaattaaatagaattgaaggatcaaaccaactacaaaaaaggtatcaaaagaattttaaagccaaagacagatattcctcgaataatgtaccattgaatgaacaaagaaatagggtaagaccaaatctaaatcaaaggtacatggtagaaagaaataacagtaacaagaacaacacctattataataataataataacaataacattactaattcacctaataatattggtaataataacagctactttacccgtccaaataagagagatccaaattatgttctgccagcattcagagataaatttagatataacaacgccacatgttcgaaattaaattgcaagattgtaattaatgatccattagaaggaaaattagatctgttaagagagttaattgaaatgtttttagtaaaacaaaaggaaaatttaaaagagttatactctgtgattcaaagatacgatagaaataatcctattgaagaagatataacatcattcgatataactttaacgggatcaaactgtattttaacatttgactcgtttcaaagttcaactcttgtattaagttgtcgttcatttttcaacagacaattggggttaccatctttgatgtggtcaaggttaaactcatatattgaatttggtgatcatattataaaactatgtagtgggaacattattactatcgagaatgtctcatcaccagagagttgtacgaaaaaatatttatctgaaaagacaggcaatagtaactttgaagtatacccaatatattcttctgtgaagatagagggtgataggatagaaaagtttacaaattgtgttataatagttattaacactgatatcaataacaatggatcaaatttagatgatagaatgtcacaaaagtttgctgacgttttagatgcatgtgatatgaaatggttcaaaccaaataagagtgagtttggattaagacaaaggacatccaaatggttatattcagatattgtacagttggtacaaagtagacccaaggtagtcaccacgcagcaagagaatagggttttattattattgaattgtgttgatcccatggatctaaaggataatgaatttgtagaagagatacacgacactttattagggacactggacggtgcagaaaaagttaaaattatacaacccggtgcaggctatagattaaatttatcacatataagtgattatgttggctgtatatttgttcaatttaaagattctaagactgctcaagaggctcagaaattagtcagtggtactgaattcaatggcagaactgtgatctgctctcaattcaatgaaagcgatttcgaaacattacaattatgatagctatactctatattccgtatatatatatatattacgaaaattatagaaactaacaattaatagaagacaatactttaatattatacatgcaaagtcaacaataattggaaaattttctttactctattcatattaataaaggaaagtgattcttccaggtgttattttttaatgtttatagattcgttaaagctcaacttcgaaagctaacattatgtatttatttttgtgtatactgctaaggatgaaacctataagggatctattggatgtgaaacgtctttccaccttatcaataatatctatacctcttcttcagtaagtaaaattttgctgccggaattgttggtcttcgaaaccgagaaatagcctgcgcggcttccataaagagtaaaaaaaacaagaaaaaccagaaaaagaaaaagaaaaagaaaaagaaacaaccaaaagaaatggtgcacgtcacattgaaccctaacaaattctatagaaagccctaatacacatataggtgtatgggtgtatgtacaactggaaaaaatatccaggcggaaaataatttccactcaaaattccgcattcggcttgcaggaaatttttaagtcacatggtgtccacctctttatcgtacaaaatgtttaaatatcgcaacgattccttgtttttatatttttattttttctgattttttattttttaaatatatagaattacattcgcactggatatgacctaaaatgttcgttgcgagtgagaattggatattgcaattattgtctagaaagttaatgaagagaagaaacggatgagttgaaagtagagatcatccctttcaaacttcagaagtagtttaactgtgtacactttgtagcaagtagcggtccatcaaatttctatttaggatacagttgttctattttttttttttacttttcttttcttttatattgaagataaaatcgataaattaatagacaattgtatagcataaataaagaaatcatatattgttagtgaattgacaaaaaaaaagtctccaaccactgattttaagtatgactgatttctctacagtgtctaaggatcagccagaggctacttctgcaagagttccacaaattcaaaggaagcactctacttcttctttaagaagaagtcgtagaaatggccatgcaagaagggtccccagattcaactttaaaaaacagatggacatggaaggtacaaattatgatgttatcacttcagtagcatatttgaatgagaaatatgggttaagaaagagtcattacatcgagaagtttattaaatgtattcatagaaagatcaatatagatgcaagtaagattaataacaagtacgtggagaatttggatccatgggtgaaatctaaacttttccttttactggtggcattgtctgaaaaaggtggtcctgaatactgggtggataaagaggaccaaaagaatgacaataaatatattgagtctaacaagatacacattgagagcccaaatttagaaagaaataataataatagtaataagatttcacctgccatcaaatcaaatgagagccaagatctggcaccctcagaagataccatagatcaacatgctactacttctaaagaaaaacaccatgaagatgagaatgtctattctgatattgataacacatattatattactaccttaactgaacatatcatacaacagaatattaatcatgacttcaatgaatctacatatgacgaaaattatgtattttcatctatatgggcaaatttcatggagggtctgattaatcattatttagaaaagattattgttccacattcggaaatgaaagtttgccaacaattgtacaaacctatgatgaaaataatatcattgtacaatgagtataacgaattgattgaaaaaagtgaaagaaatggctttttatccacaccatccgatattaaggagaaagaacaggatatagataaggaacaagaacaagataaagataaaaaacaaatggataattccactgaacaaggcaaatcaaacgatgaaagtcccgattataaattgacattggcgagtatacatgaggtagcagacaaaaataacgatttagtatcccaagaacgattagaaagagctcaaaagttgttatggcaagcaagacaggatattccaaagaccataagtaaagaattaacactactatcagagatgtattccacattgtctgcagatgaacaagactatgaattggatgagtttgtttgttgtgcagaagaatacattgaatcagagtatttaccaggattagttaaagttcttttcgctaattgtggctctattgcattttggaaagttttgttagtacttgaacctttcttttattacattgaagacgttgaagaaagtgaggaagaagatattgacgaaaccactgtgatggataatggtaaatatggagataagaaaaaacaatcttttaaaccagatccaagagtgataacattagaaaaaatatgtgaagtggcagcaaaacaaaaatggatctaataaaagaagaagaataaaaccattgttttattagtatatccaattcacacatccaaataaataaaattgtattacaattaactgtttattttaatttgtgtatgtacgtacataagaccgtgtccaataaagtagcgagcatatatatatatatatagttctcatttaagtttgtttcgttgattttttattatattttggtaattcagaatatttgtggttctttatgtttttatatttcttcatctttgcaaatgtacctagaacacgatgctttttggataaaacatctcttgtaacatctgaaatatctctatcacccctggtcagttgtaaaaagaagtacatcacgacaagtgcgacaacaaccacagttggaattgttaaagcaacataataccattcttgatcatatatgactgcatctatccgaactctatcctcttcagtttgcttagcgactttagaccctaacatgatatgtgtcattacaccattctccagtggatcgaaattatcatcagagatatgtgatggttgaactgaaaccacaattttacgatcaaaatacccttgtaaccaatcttgttcgatagtaattgggaaaacaccatccacatttttaacccattcagaagaaaaaaaagtagcagaaagatctcttttattgtaacctttatctgttaatttttccttaacataagaaagatgaatacgaacgttttctgacaccttatcggaattttcgtcagttaagaaatgtgtgtaccaagtgatgaaataagttttaccaaccttccatactgaattttctcttggagtacagaatggttcacttgaaatatctttagctaaaccctttttaaaataacgatctggagtacaccttataatggggtttaaagaagtataagtatcatcttcatcaataaagacttcttcttcatatacatcatttggatccatgttgtgggccttcaactcttcataggaataggtctttgtagtcaatgtttggaagtatgtattataagttggactagccctgttagttctaccattcttaatttctggtttgatggtctttggtgaaccatctttttctagagaaatccaaggttccaatggatcaggtgtaggtaatggtttcttagagaaagtgactcctccaataactgttggagtaacaatttcctttttagaagaataaatagtacggatccatggtttgggaacttcactggtagtctttttgtctttctccataggaagatggacatctttccaaccaagggcaactgaatttaacagcccaaaatataaacaaacaatgatggttctcattattcttgatctgcttttaatatggttgatctttcaaaaaaaaaaacagattattatactaatataaaataataaaataccgaacagtattgtgactgttatcaccaagtaatagtaagttaataaattaagtaatacttttgttgttacgaatgtacttcaagtattatgtttatttatctttttgatattttcgtaaacaaagaaggaacttaaagcgatgagtaaaaaatcctttctttttttttctttttttagtgcttgttgtttctttttttcaaaattttttgcaatattccatttcgggtttccgaggtattttaaatccggagacggaaaacgcaaaagccgaagaatataaatcttgaatattcgaataaacaaataattgtagaattgattttgatgaattgatagcaacgtacggcatcacaatatatagaaagaagagaaagttcgaaatacatagctaagaagaaaagaaaagtacgatgcagagagaggttgaaattcacaacgaccaacaataagcggagtacattttagtagatgtccacggtatggaaattcatagcagtgattctaatgacagatctgtgatagagacattagttaaagaaaatttgtcttatttccaatattggactgatgttcaattagaagacaaagcactttcatggaggggtacagatttaagacttgtaagtggtatacccccaaataaattgagtaatgatgattcagaaattcaaagagaatatattttacctgtaaacatgacgcaacataaggaggaattcattactctggaatgtttggatttagtatttgaaaaactttgtaataaggataccaggagaattattcttggaattgtgaattcagatggaacaatagtgttttactctatttacaatggtattcacaaaccaaagaaaaactgatttatatttatccatacatataggcagttatatctgtattattagtatataactcatgtaaattttttacacaaatatacatatgcatatacactatatttaacttgcaactttttcttttacaactgcatgtccatttgtcacaatttcctgtaaccacgaaagttcaattctactgacatttctggcataacctttcgtagtaaacacatattccgtgtacataatagctgggcacgctttatttaaaaacagtaaagatgaaggatgcacacttactgtttcaccagtggtaactgttctataagatctatcaggcataccaatggctatattttttgtaaatccagttaagaaacactttagtatagattcaattttatctttatcctcactgaatttcttattcaaaaaaggtgtgctataaaaatcgtcttctttatcttctcctatgttggtattaatactatttttttttatcttctttgaaaaggtctttgaattactatcgaataaccatttgcagtatgttcttaattgttcacgaattttcactacatttttaaaaccacggtatgatatgcataattccttacaccaatcttgtctttccacacttgatgccacatcttttcctaaatcataaaaataaatatcaaataattcctttaacattattaaatcaccataatgtctaccactattacaaagtgacaatcttctttcgttaacctcatccctctcctcaggttgtggattcaatagtaagttttcaacactcaaacacgaaactatatcgatcacctcagataaacagttgcattcgctagctttaattagcacactactcaaatgtggttgaattggtaataatgacatttgttcccctcttttagttattttaccaaaatcatctaatgcccctaactggtacaattcttgtaaacccataataatcgcttctttacctggattctcaaaccaggtccaattaataatatcttgaacaccatatttctttaacattaatactggagaagtcacattacttcttgcaatttctggttctgtttgatcaggcaactttttataatcattggttctatataatctataacatttcccctcactttctctaccagcacgaccacacctttgcatagcacttgcctttgagataggaactgtaagtaaagtagctaagcctaattgatgtctccaaactttaacttttcgcagtccagaatccacaacaaatttaacaccagatattgtaacagatgtttctgcaatattggtactaaatataacttttcttttaaaccctttaactcggttaaaaactaaagcttgttttgctggtggtaatgctgcatataatggatatgctatcattagtgggactgaagtctccttatggatgatctcactgatcttatttaatatggttacagctttatcaatctcttcttggcctggtaagaaacataaaatgtcacccatttgttctccctgattaatttgaacacatgatctaataacactatctacaatgtcatcacttggtgccttcagataatattgtgtaacgttaaatttcctcccttcaacaaacaatattggggcattatcaaaaaattgactgaatttttctgcttgtaaagtggcagacatcacaatgattttaaggtcaggccttgacttatgtattaacgatttcaaaaaccctaaaattatatcagttaagacagttcgttcatgtgcttcatctataattattgtattatattcttttaatgttggattcatcatcaactctcttaataacataccatcagttagatacttcaactttgtagttgagcttgtggtgttatcaaatctaacagaataaccaacatatgatccaatattacaaccatattcactagctacacgagttgctaaattaattgcagctactctacgtggttgtgtcacagcaatagaacctctgattttgttttcctgaaaaaaattcaacagaaattgaggaatttgtgtagatttacctgaaccagtctcacctatcaaaacagtgacttgattttcagtcaagtatttcattatttcatttttgttttgataaaccggtaaagtctttctaatgcttaatagcttgttagctttctcttttaattctgttttagtgttctggtgatgaacaaactcatagtcatcattttcatcatcagcatctgaattattctctatgaatttaactatctttttcccattattatttatattgatattggcatgattcctttttggcctgttgaaaggatgaactttggatctatgtttactgctcttttttgtggttttgctatttttattcatatgtaattcaattgtctctttataatttctcaactctatcaccttctactagaactgttatcgctagttactataaatgtatgttaaatgagtctcgatgatttcatctcatcgcaacaacaaacacgtctatgtatatttttatattttacgtaaaagtttacttataaaatttttcatattttccagaaagccgccaaaaccgtagaatcccaccattatttttttacgaaaaatgatgacattgatacaaatatccatagctagttgagttcttattatatggtgataatggaggaagaaaaggcgtcgattaatctctccaccttccttttcttatattaaatggctacgtaacttatctccaagagagaaagtagaatggaaaatagtaagttttaaatgatcagatgctaaaataattactttttttattgctgataggtgaattttacttgaaaaggaacatgaagtactttttacggagttctagctttgtattctcatctttattatcaatatattaaatctatcttatctttaccatgatatggttttaagatttcttgagaggatttggtaattcttctcattctttttgttttgtaatatttcactgaagtacatgaaagtacatggaattgtgaaaattagaaaaaaaaagtgctcataatgcttaaaaagaaaaagttacctttcaggtattctgttagagattggtatatgcaatagtatgctttagttaagatgataaactgtttttttacctatttaacggtttcttcttccaattcacctttgaaatattaaatgactcttacctcacgaaattttatgtttgagctgactaaaccagtagattccagtaaaatacatatataaatattaaaaatatgttacaaagaaaacataacatatagatgtataatttttttaaaacaaaaaaagattcacttgaaaaggaacaacagactgatacttttatcagtaaacatatggtggaattaattcaagacatatttttagagaacaattagaaccacagggattattttacagaattgatatgtatgtatatataatgtgtagttattaggttgaataaattatccgattgttaataatcacaaaataaatgaaaagtctaaaaaaatataatttcagaaatagaaagtgaatattttccattcaccagaaacgtaattcaagatataaatgtaagggttatctcaagtggtatactaaaatatggatattaattatatatataaacacttacaaattatataattggttgattctaactattagatagattagtcttgaatattcgtcttattcttcttaacctattagatagattatgaatattaatgctgataattacctctggcattatctctcaataatcaagggtctcttaagtaagcttcttaataatttaccaccaatgtccatccaacgatcatatgctcgttcgaacacactcacaaccttgggcccagagtttcggttgttccaagtccttcgcctcgacattaggtgttacccacagactacgtatttcaggatttccagttagggttccttacaataaaatgctttctcttcagcaaaaaagaaataacaaatagaaacaaaatttgttacttttcttgtaccattttacattttaattaattaactacgcatcaagaaaaattctttagctttatttctaaaaggattatcacaagtaacatactaaaagacggatattaattatgtatatcaacacttatttttttattaaccattagtcagtgttttcataattaattcagaaatcccttaaaagtatatatggaaaagtttctagagtattcaaactcctatagaaaataatctgctctaccaaatttatatcacgtaactgtaatagatgaaaacccgattacgagagctatactcttctagacgctaaaatagatagatatagcttgaattgttctccatatatgacatataaattatactttacgtaaagaataaactaatatacacagatatacagataaacaaaaaaaaacaagagcgtcgtcgtcgaccaaggaatccacaagatcgtttataatgacatccggatttcatatgttacaatttttctaaacttacctttttgcaaaattttacaaacacacataaaaacaggagtaaccaacataagtacaagagagcaaccaagaagaagaaaaaggaaccaaggactacctaggtttagatatagtatataagtgtatactattaggtcaacttagattaaggatatatagatatataggaatattacagctagagatatagaaagagtctatatcttatatctatccaagtgaaatattattgagatttcaataagaactactgttatcagaaacacataacctcagggttattacaattacactatacaaaaaaatttaacaacaaaaaaaggggcgagctgggaattgaacccagggcctctcgcatattcacgtattcaacaatacccaaagcgagaatcataccactagaccacacgcccaaacaccttacaagccctgttgtggaatagaatagttataaccatcaagattacataagatcctgaatgaatctagaaccaattagtgtattaataagccatacatgtgctacaacattagatgctgcataataaaaagattggattacataagatcttggcaaatctagaatttacctattgttttattaagtcccacgtgtattactaatcaccatgattagagaattgggatgcagttctaatccagtagtgcacctaaattaatataataaattttagggtttgaatcagtcaagtcattaatgtagtaatctgaataatcgatcgagctccagaaaacatataaaaggacaacgttttcaggagataaaagatcatcttccatgatcgtttcttgtaaataatttatatattatgtataaacaaaatagaacaagcaagtaacaagtcaagtaacttcgaataagtacattagctcgatataagccgcttaatatataagaccgttttagtaattatactatcgactatagttgattactgtctcgattatttgaattactattaatattatttgcgcttccctggaatacacaaagaacttcaccataccatactacaacaaaagctgttgtggaatagaatagttataaccatcaagattacataagatcctgaatgaatctaaaactatttattgtattaataagccatacacgtgttacaacattagatgctgcataataaagagattagattacataagattttggcaactctagaatttacctattgtttttgttagaatttggagccttctgcatccatggtaatggtagacatcattaagttatagatgtctgttgtgttttgtactaaatacatgtatatacttattatatagtgtatacagtatacattcttgtatttacttcaagtttttttttaaaaattttcatttcttttcaaatcttcgaaaaacatacttggtgaaaaataaaatgtcttcctgatattatgatacatccgtacatcacataatatacagaaaaattaattaaaaataattcttgtggaaatgacagtaataaactcccattttccaacatgtctccttaattggtttttcttataacttcctcctgttcactataacttaatgatttccattaccagaattccagaggacagtgattggaagcaactctttgggtgtcaattcatgttgtagaatcactttcaatttagcaaagactcttctacttataaattttgttaatggatctggaagtttttttttcatttatttgtcctaactcctatttatatctattgatcctttttctaatctactaatgaaactgttcatattcaatagtcttatgttcttttcaaaaataattcttatgacaaataagatcaataaaactttcacttttcaacattaaaagatctaaaataaataaaagaggtcaaaatgaagaaaatacatatttatttacgtacactaataaatatatatttatatgttagataacaagaaagagtaggccaaatataaactaacgattaatatgcttattacttaaaaccactgacattcagtaaattactggttcacaattatttactattttattttttgtaattgtgtaattgtgcagaatatcttagtaactgcaggttgtgcatcgtacagatttctgattagagaaagatttttattcttggtgtgctaaatactaaatatatataacaatcattcaacaataacatcttgttatgttcagttcctctgatccagttaatataaaaacttcaaatacaataaatagacactgttaatttttaataaactgaaattaaactcagcattaaacgaaccccttcacacatcttaaatttgaaatttagtaggtaaaacaatactatgttaaacatatcgcaattgttataaacataaggttgaaaaacctcaaacagagattcccattacagcatttaaatatatgaagataagtaaaaagaccttactgatatactaatcagagattccatttgaatataattttgagatgtgcttaatggttattaacgaccacgtatccctttacccataataagaaattattatatttttaatagttaaaaatgtttacaatcctatgtaaatgttgaaatgtattaacccaaataaagtaaagcaaatactaatcgtatgaaaaaaaaaaaagatcaaaactgtttattttactgaatatttaatactaccatatatataatataaaccttttatataatctgagaagtaaatttatgattacttcagtaatatgatttcaacagttaacatcaagtaacaatcttctataaacaactcctaactgatctataatgagtcggatgttccaatcttataaaattagccatttttcattcctattataaaaatttctcatgtcgacataaactagttcaatatgaagcttctagttgtattaacaatgccttaataacaatatcattaagatttatatatatatattttttcatatttgataccttttatcactttaaatcagaggatagaaataattatatatatttctgtcttcttaagaagtttattcagcaattttttctttagataattctgatattggattagacactacacgtatagaattaagattaagaccgtgtttcaaaacttttggttcagaaacgtgatttgacagctttggaatagatttagattgagttatagagtcttgagattcgatatgtgagtgtttggtattcttccaaaaggctgtttttgtaccaggaaaactccaagattgacctctttcgttgtttgtatcattcttaagggtatctttgttatttaaattatcatctttctttaacttttgttccaatctttgtattttttcattttgattctctacaagattcgtccattttgaaatttcctgtttcaacattgcattataggataaaacgctttctaatgatctcgtctgagaatttacctggtccagtaacttactattcatatcatgaagtacaatttctctatcatgcaattcatttaactcttgttgatagtttttatttgctagtctttctttatctaaacataactgtaatttaacaatttcttcacatttttctaaaataatttgcattgcatcttgtgtatcactattactcctatccatatctcttgaactatttgatttgacatcagatgatgactgtgccaaattgtcgattttagtgtctttatctgattcatcatccttttggacattaccactaccatcactactaagttgtttaactattttaatttgttctgttaattttgcattttctaactttaattgactaatgtttttatcaacttctttatgcttctgttgaatattcatgactgtctctaacttctttcttaaaaattcaatttgcaacttataattttcttctttaagtttaatttcattaacatatatatcaaattttgcctttgaattcaaaccaaatttattatgataaatatatgtctccaatttagataaacttgatgcaaatttcaaagaatctaaagtccttgtcaaatcatttttataagtagaaccacatattatgaaaagatttttataattgtccattaaagaagaataaagtaatttagtaaatactgaatccttaaaatgagtatgaactttttcattactacccaatctatcaataatcaacttaaatgaatcaatacctaattttatttttttcatatcttcttgaccaatatcgttcgtcaaacctatatctttaaaatctactatttgcaatatactatttttcaaaatatctttatcaacatttaactgttgaatattgatcttaacgaaaacatgggatttccttgactcataataaacagatgtcaattcgagcagttcattaagtagatgattgagatccttaatattgatacatttcagatgttttatactataattatttttattgatttctaatacagtttcatcgttcttattaagatgatataatttcaacggctttctacttgtcactggaaccagtaaatcatagataacttctgcatacaactcatatgctgaaagagtaattttaaagtttgaaccattaggctgttgatgataattttctgataatttagtaaaaagcgctttacagatagttactatataaccttcatgttcacaaaacagaaatctcgttttccctgttttagcttgtccatatgtcattatgttataattatacccatctaaaagatcctctacaatattgccaacatcaccctcctccttttggatattattaaaatgaaaagtttctccattaattatccatgtattatcgtctggtgtttcataatcaaattttaaattggatttatcattaggtggcatcaaaccatcccaaattcttggtttcaatcttatcataatattagacggtacattttttgctacacgtggtaatttaagtgattgcatatctatattctcataaataggtaatttatattgttgcttaacattatttgtatatccaatatatttcatttcccaattttttctattcttcttattattttacatatatatatagtatatctatgtaaatacctcaaagatggctgtattcttcaatacttaaaactattcgcttaccctcttataactacatctatctcttccagcattcattactgcctcttaactcaaacatcgacaaaggcagagatgcttcatgcatctttttaatttttcagagaacaatttttgtgtctatttctttgtcctcgaggatacaacaaaaaaaaaaatagaaccccacatttttgtatgaaaatatatatacactggagaagatattcgtcaaatattctttgtaggcaaataaacgtatgtgctcataactataatgattacgatacagtcaattaagaagaaatataaatatctaaacagataaaggagtgctattacgtaattgaaacagggatatgtagttttggattttatattaaaatatagttaaataatatatatagaataataataatatatatatatgacaatataaacacaccaccaaagagaattaatattgaaaataggtgaagtaaggattgtcattataaagtgatagtatagataacaaacggttcatattctgtgtcaactagagatgcatattgatgtaaggaggtatcccctttatcaatttttcctttcttatctttaacaaaggcattcccacctaaataaccaaaggagtctaataattcagacttgcactttgataaaaattttggtggcactgcaattattttactgttaaaatgtggtggtaaaccataacgtaaaacagattcaacaaatactcttaatgctttaatatggaaccaattgatgaaaatgtcaacataagctgtctttgctaatctgatcaattggatccttaaagattgctccaaacttgcagctgaatcatgttcttgttttaactgttcaattaattcttcagaatagttaaaatctcttggtatgaattttttctctctacaattagttatgaaatcgggaacatttttcttgaaaagatgaacattatataataaaaattcagagtctcttgataaaattgatgcagaaccaggaactacgtttgcggacaacctttcataagatgattcgaaacttttctgtaaactttttggaactgctatcaataaagtagtcaagtgttctgaatttaagataaaatccttgggtttaacgatatcgtgtaaagatctaacagaaagatcacctgtttgtttcctttcagctgcagtcaaatttgacttggcagtattataatcggcaaacgtagatctaacatctaaatctaattggcttgattcatttgatatgatctgaatcaattcctttatgcttttatctaatttgaatttacgtgactgccattggaaattttccaagtattctgggattggcatgttatttattggaatagtggtataatcgttagtaccggcttcattgaattgggaaagaatgtcgataattttatttatggaagtatggatctgcccatcaatcttactcaattcttcagattcaaccaaaagactatctaatgaacctatcttgaattctggaatttcaaaatttgtcacatatgctttaccttgaattagggactcttttaaccatgtatcggtatctaactgagcagaaatcagtctatcatcattggccaaatgagcaggtttggagttcaatggtaaggataaaagtataaaatctttagctgtatataatgtagtagtcatattttaaaaactagaagaaatcaaaacactaataaaattgatatttatgtcagttttagaaactcactaaaactagtaatattattatgtatacttttatataaatgattataatttgttaataaatcacacaaattctaaatgataaaatactaaattcatacactctttgcatttgcatttacctaaattatattctttgtctgttcttgataagtttttcatttttttctacacagtatgcttttttcttaagaaataaaattaatttatttcgaaagaataataagactatttgataaaggagaagtgatcttgtctttttaaaaagtgtgtgagttgagaagaagaagagaagaaagaaaaaaaatacagagaggagcacagaaaatagatatatctataaatcatgtatcatatataatatgtaagtaagattacagataaaaacaattgtgatatataataataatacattagataaattagaaattatatacggtcttcttactttgttgtcaccccgttcatttcaagaccttaccatcaacaatttctttgttttcaccattgacaacaactggcttatcccaagcccacatgttgttaacgaattccttgtcgtcttcattggttgggtctaatttagtgtaggagtaagattcccaatcgggagcgacatcgaaagctgggacgttgtcttgacctctaaccataaaagcaccaatgataccgttgttgttgttttcaccatagacaaccatggaaccgaacatgtatttggtggaaccagttaatctgttgaagaaaccaccaatcaagttattagacatgaaagttaaagttaattcatcgttgtatttgtattcaaccttccataaagagtattcttctgggttgtaatgttcccagaaccatggtaaggcaactggtctagtatcttcgttggaatactttctcttccattcgtccaagacgaaagtagacttacctaataattccaatggatgctttggtttcttttgtggagcagcatcattagattcagtagattccttctttggttcttcatccttcttcttttgttgttgttgttgcttgttagattctttcttttccttttttggtggattatatttgattggttcatcaatcaacttataatcagcataggtttcagaaacgattggagaagcaagaacagtgttgaaccatctgaccaagtatgggtggttctttctaaattcagaaccacagatagagctgaaagcaaaagcccaagcagagaaacattgaacatcaccaacagagatgttttcagtggctaagtatgtgtagtcaaccaatctttcttcaaagaatttggcgtataattcaatagtttgcatattagaatcgacttgtttcttgttgtattgatagataccagacaacatcaagaaattaccagcaatagaagagaaaaggttggaattaccaatggaataccatcttaaaacttgaatcttttccattggtgtgaaaccaaataataatttttggtccttttctggtaacaaatcaatcaaataggataagatagcagcattttcagtcaatcttaaaccctttggacctaagaaagctgggacttgatgtaaagtgaatttttcttggaaatctttacagacagtagacttgatgttgacaacttcaatgtctaaattatagtggttaacgatagcaacagctgcctgacatcttggagatggagaaatgaataaagtaccttgagacattttttgaagatgttcgacgagttatcttatcttgagttatcctagtgacagaaaaaaaagggaataagatttcttaattacaagcaagaatacaactacacacatacatacatatacatatatatatatatgaataatctaagtagatgcagatgagatgatcaggaaaaaacccgagagtgaaaaattttttttgtctttctttctttttgctctcgtgttaggttgtcatagcaagtttccaaaacaaaagttgatttttttattttttattttttattgtatggtgtgttttatttcttggtaggcattgcttagtcatcatgttatctgctatcaggcggattcaaacggtttctagtaccgttcctaccggaattgtacaatgtttcaaaatctctttttctttttgatttatttcaccacagaagatcgtttggcacggaaagattggttgtctgacaacatccatacattcaaacactatgttgccttttgatctttttcttcgctacgatgagctgaaatgaaaaatttttgctttggttattattattaaaaggatgtcaatattgatgaactacgatgagacggattgtcattattccattaagaatacaacagggaataaagttgtaaagttagacatagaataagagaaatatatatatataactacattacgaagaaatcaagaacaacaacaaaaagaaaaaaaaaatagaagaaaatgagtcaatcattggaagaaagacttcgagccaattctaatgcctttgatggtttattatcattaataccagcaaaatattactatgatgaaaagacacaagaccagtggaaagcgaaaaagaaaagtaaaatgcaaatgaaagaggacaagttgaaaaagttagatcctgagcaacaaaatgatgaaactggaactgctttggatgttttgaaaaaaagagaaaaatcggccaaacctgttagattacctggtcaaggtcttagatcttccagaattactattacttcagaagacaacagcaaagaaggaggagaagaagaggaagaagaagaggacgaagaagatgttgaaaaagcaccaatacatgtacaggtcgaggaatctgaagatgtaagtgacaatgaatctattaatattatttttgatgatgaaggcaatgaaatcgaactgaataataatcaatccaacataaataaagctaatgatgatgaaggtggagatacggataaagataaagataaagataaggataagaaagatgaatctgagaatgaagtaaaattacaaaaacaaaagaatttggaattgttacgtgcaaaattacaagcaaaaattcagaatatgagaaataaaagaaaggcaccaggtactaacgttgatggtgctcctgtatctagggaagcaattcttttacaaagaaaacgcaaacaagagttgaaacaacagagaaagttacaagatttagacaattctgatactaattcggaatctgataccgatgatgaaaatgatttagatatcgaaagcggcccaatggctaaaaaattaaagaaagatactaaaaacaaagaagaggatgaagctgctaatgctgacggtgtcatgtatcaaagtattatgtttaatgatggtgtgcgtacaacctcggatttacaaagactaagaaaatctaatcaaggtaagaaaaagggtccatcgaaacatgattacaaagcacaattgaaaatcctagaacaacggaaacagaaattacaatcaaaggatgaattagaacaaatcaaaactatagagaagaacaaatggcaaaaagcgatgttacaggctgaaggtgttaaactaaaagatgatgaaaaattgattaaaaaggcaataaagaggaaagaagctaaaaagaggaaatctgctattgaatggaatgaacgtaaaagagctgttgaaataaataaacaagaaagagccaaaagaagagaagaaaatttaaggattcgtaaagaaaataaaggtgttaaaagatccaaacaacaaaagatgaaacgtaaatttaaaagtattataacaccaaagaaaagagctgggtttgagggtcgtttaaaaaggaaatagtcatatcatctcttaataaattttttttgttaaatataataagaaatataatgttatactatgcatataaacggaatatacgtacaaacacatacacacacacgcacacgcacatatacatacagatatatatatatattataaatattgtaataaaatgcaagagaaaaaaatgaaaataaacatacacccatttaatcactgccaatagatggtatgttttcaaaataataatgataatgcaattcacacttttcattaaagggatgtttacaatattggcaacttaaaggagttgagaagcttaaatattgcttaaaagtcagttccttcccacaatgaccacacaatatacattttaaatctggatttgcaccaacatcaaatttctgtactgaatgagaagtcaattcattgtgacattggacacatggataataatagtttggacaacattttaattttaatgcaattatatcatttgcaccgttccaatgttcacaacgagtctctgcatcaactagtttgcctctaacctcagccatatgattctttcttgatttttatcaaatcaaatatgcatatataaacatatgtcagatcaaatatatatacaatactctatataaaacagattaccagcttaaacaaataaatgtagatataagttcctacaatacgggtaatataaaaaaaaatgcagaaagattataaccttgagaaaaaatttaaccttttctgcttaacaaaataacaatattacacatgttaaacacattaagcatacctatagaaaaatatctgtatctatataaataactatgcatacaaacacacacacacacacacacacacacacatatatacatatacatatatatatctatggatatatattggaaatagaatttttttttgtatacaagaaacatatgaatatttatagtcgttatcgatgaataatgataagaaaggaaaaaaaaaaatatatatatatatacattatagacatgaatttgttattactatttttttttgccttttatttttgtttttctatagatttgagaattgaagatcggaatccagaatttattaatctctagcattaacaaaatccttacccttattaatattcttcttcaaagcctccttgcattgatctaacaaaactttttcttcagaagacaattcaccgataggtaatatttcttcaacaccttttggacctaatctgactaattgcgcaaagaactcgataccttcatgcttaaaaatcggggattcaacaaaagttggttcaacaatattagcttcaccggaaagacctctcaatacagcatcagtgaattgggcacctgcttgagccatggataaagtagcggaaccagcaccgttcttagccttaacgacttcgtcaccaccaaactggactctgtgaatcaaagtttctttctgctcttttgtcaatttggtggaagccaatttatcttgagataataatggtaagatggttacacctgaatgaccaccaataatgctgattcttgaattcttggttggatctgtgttagtcaattctgaaaggaatctggccgacctaattgagtctaaagtagtgacaccgaacaatttctttgggttatagctccctgctttcttgaacacttctgccacgattggaacagtggagttaactgggttggagatcactaaaacacaggcgtctggtgcggcctcggctgtggctttagccaaatcatggacgatccctgcattaacgttaaacaaatcatctcttgtcatacctggttttcttggaacaccggctgggatcacaacgacatcggaatccttcaacgcattatgtaaggcatctggttcatcggcattgaaaccacggacggtggaatttgttgggatatgagaaagatctgtggctacacctttagcatttttcaaatcgtataagttcagaccagtgactttttcatttagcttcaaaagtaaagataatggttgaccgataccaccacaagcacctaggacagacactttatatggattgatcgtggtagaagaaaaacacctcctgacggcaattctcgaaagcattattattatttattttttactaatttatttatttatttatttattttattttattttattttattttattttattttatactgctagttgtttgtagtataactaaataaagatacgtttaaaaatagtttagatgataacgaaacaacatacagatataagaaggccagaaaaaaagagcgaggaggaaagaagcacagtttgaaagccatgtaagataatagtaatgagctaaacggcaagcgttaagacgattgagatgtagttcatcttactttagtgtattttatttataataaaatccacttgttttagtttactgttttcaatacgtaatctttacttaacatccaatgaggggtgaggtaaaagagcgtcaaccgtatcggattttctaactctgtttgagttttccacgcattttctgcctattttaccaagagacagaaggagtttttgttgttctttgctgctctgccccggtgtaagaccgttcgcttaaacggctctcacacagcatcgcccagaatttcctccttttcggctatccctgttcctgggcccgttcctctccctctatttcccccctgttccttgttcttgttcttgttcctgttcctgaccctaaccctagccctagccctagctctgttcctacttcagtggcagtgagagaaatggaagattattgatagaaaggaaagaaaaaagaaaaaaaaaaaaaagaaaaaaaaaacagatgttgttggctcaccgctgctatccctctatacataggaggaaaaaagaagagaggcggaaaagacacatagtaaattgaaatttttctctttcttctttcttctttctactttccttttttttttttttttttttttccttttgagaagtgaatggtgaggggggcgcgatcctctgcgttactgaataagttttaaaacacgtaattgcatatctatataatatgtagttttatgtaatatcttttattttactcttttgggttaagataaaacggagtttaaaatgagtaacttctctcttttctcttttatttttttttcttttttatcttttatgtttatttaactctctatatattaaataaattactttttatcttggttaaattaaataatgaattcatttaaataaagaaaaagcaagcaaacaagggataaacataaataaacaaatattaagatatgatgtataatcttgctaaggtgtaatagctttcttgtctcgtctctgctttttttttttgtccagcaaccaccagcaaccaacaatttaaacaagaaacaacaacaacaaaaaaaacaaaaaaatacttgcacttctacaaagaatttaacctaagtttaagaaatacaatatcacatcaacttttgattaaaaaacagtcaagacccctattaaaacttatacaaccaaatgccttttatttttttgttttcatttcctcttcgtttcaaatcatgttcattcttatcttttcttcatttacctttaatttacatttcaatactagtagcatcgtttagattattttgcacttcaaaaaaaaataaaaaagaaaaaagaactgcatataaccttaattacaataacgtggttaaagtaaaagggataaaccctataaaattaaacacggatcaatatttcactttaaggttttaaaaaattcttcttcttcttttttttattattaatattattattataatcgctgttgttgttgttgttgttgttaattttagtttatttatatttcgataaaaggatgcttttgaaaagaataaaagaaaaataccctaataaaaaaagtagagggacaaaaaaaataaaaaaaaaaaagaaaagaaaatccgactggacatcggtattgtttttttttattttttagattaaataagggaaatctatattgatatatattattttattattttattattctaccactccattgttctattgtttattaatcttttttatagatttttcctttgttctctttgctttctgccttccatttgatgtgtcttttttatttttcttcttcttcaatactaatgttttgtctcttctctattgtgaatagcaagataacttgcttcagcaaaaacaacaactagacaagaaatcttttatcatttttttctttcttacaacacatctttggagatatgaaataaagaaaccgaaacaaaggaaagtgaaatcaattaaaagaatactgaagcatgagatgttcaatgctatatatatatatacttatcgaatccaatttataaggactctcttatcctttcttgaatccacttcttgttattttccacatcatatgttatcttcaacaaaaaaaaaaagaataataataataatttacaaaagacaaataatcaaactgtttaataaaaaacaacacacctaaatatatctcctcattaacaatatgtcgacctcatctgttaaagatttggaatctcaaaacccaccaatagaagcagttttgccctcggctgatgatgctttcccacaagcagatctaccaaaacaaatgcataaaaagtctagattcgatataggcccagatacatggcataaccatttcattgcagcttatggtgaattcgtcggcacttttatgtttcttttatttgcctatataatttgtaatgtggctaatcacgctttggaattgaaaagtagtgcaaataccccgactacttctcatccctctcaagtcattatgatcgctatcggtttcggattttctcttatgttctctgtttggtgttttgcaggtgtctccggcggtgctctgaatcctgctgtatccttatctttggctttatctagagccatcactcctactcgttgtggtgtcatgtgggtctcacaaattgtggctggtatggccgcaggtggtgctgctcaagctttgactccaggccctgttcttttcaccaatgccttgggtctcacttgttcaagaactagaggcttgtttttagaaatgtttggcaccactggcctatgcttgactgtcttaatgaccgctgttgaaaaacgtgaaactaactttcttgctgctttacctatcggcgttgccttattcatcgaccatatggctttaactgcctacacaggcaccggcgttaatccagcaagatcattcggcgctgctgtggccgcccattatttcccagggtatcactggatctactggattggcccattattaggtgctttcctagcttggtccgtttggcaaatcttacaatggttagactatcaaaaatgggttgaagctgaaaaagcagattaaacatcaaaccaataaaaaaaaaaaaacaaaaaataaaaaaaaagaaagagttatgaaaaataaaaaacaacgacaacagaaaaaacaaacaaaaaaaaataaatccttagaatacatttcacctgcccattattattttgaatttaattgctcattttcttttttcttctctctctctctcttttttttttttcttttcttttcaatcttttcttttctcccttttcaaagaagctgtgccggccaaacaatcaaaatactgtggctaaaaactttttttgcttcacatcagtattatgaaaaagtaatatatatatatataccacgaacccactcacatatatcttaggcatattcatatttacatcagatctctgtactccttaatgcttaataaatatcatagttataattatggtaacattaataatatcctatcttctattttattgccaactttaaaattaacacatttacttaaattttcctcattaataggtggtccaaaaaccggttccacaaaaaccgaaaagtgcaataatttgagaatatacctatctcaattaatgcactttactaaacctcttcaaattgtgtctattgatacaggattggtcaactttgcatggtcacaatttcttttaactgatgaagagaaacaaccacttttgagccagtgggggaaactgaatttatatagaaaattctttaatgaggtaatcccagagggcaccaaattttcgccattggatacatcttatctgacctcgcaattgactaatttcattttgaatgaatccaaaatatctacaaatattctttatactatagaaaggcaaaggctgcgtaccaacagctctaaatttgtgactgacccaattttaaatgttaatatcttagaacatttactattttatgctttaaaaaatttgagccctggtcatgacactctatatcagaataactttgttatttcatctgatcctggaagaatgacaaactattggttagctaatcaaagattcaattccaaagattcaaaaaaattaagaatagcaacagctgttaatctgttagcttatagtcagaatacaggcaacttgtttaaaatcgattctgaattatctaacaaaatgttgactttgaaagagaataaattaaagagtaaacatggaattctattcgatacactggaaatgaatcaaatgcttaacgggaaacgcaaggatgatgatttagtcgattcctttttacatggactatcatggtctacgtggatacaaacctataaaaatttattatatgagatcgatcaaaatggcggtgaaagattcccattgtctaaatggatagattttagttggcatcaacatattaaactgttggatttaatcaaagaaacttaataacaagttaatgattgaataatctaagtagaacggttactgttgtttaatcttggatagtccaggcataaccccgttgggattatccaacatcaaatagcaatcaacgattttatataagaaataaaataaatcatgaatacctgggtttacagtagcaccggtctcaatgaagaaattccacaactcgccttggactattttatgaattaaattaatagctttaatacctttgaaaggatatttggctgctagtgtcaacatatcagttttccaattatgaatggacttcgtaattgaactgaaagaggtgataatacctgtacctgtgatattagataaaactttctttctagcagatactgcttgagaaggaaataaggaattaactatgaagccagtatcggaaagttgcttatcagtggtagtttattcttccaacaaggtcagttattttgtatcttttgataatagtatccaatttgtatggtaccgagcttttattaactaagcaattataatttactttgaaatatacgccctgttggtacccagtctttaattcttcaatatattcaggtctgaatttggttagtaaagtgacctgattaggaatactcaattcatataaatatgtatcataaccaaaatcatccggaatatatgttggatttggttcagaattctgggaagaagggtaggatggggaattctgtggtgttataatttttgtgtctttgatttctttcaaatcagaccgacgactaaagccatccgctttatttcgttcacccttaatataaacgatctcaaagtcaaatgtagcaataacatctaaccaacggccgacttttagactgctatttttctttaagtgtaaatatttcaatgatccatgatctgtatgttgaatgcagtgtctacctttcaggtaatgagaccattgcatcaacacaacccaaatagcaaatcctcctttttcaccagtgggtcaccttaattgagagttgcgcaactacccacttgaataagcaactacacctaaactacgatctgttgaatcaatgtgttctaagacagcacctacagcaaaatctgaggcgtcagtagtaaccaaaacaccttttgtttcattgaatggtagtagaacaggagttaaaggcaacttctgtttcaatgtgtttaaagaaatgttacagtcattattctaagtgattagttttctattaaccaacgcacataagggcttactaatttcagtaaattttaaaataaagcttttaaatatattttacttcattccttataagaatttaaggccaaaatgatataaaatcctgttttttccatcaaggaaaaaatcattaaaaatatcgaatcactctcgactacatatttaccaatttaaatattgtttttcaaagggaatgggtaagatttttttttttggagtattatcattcttttatttctatctttttatattaagttgatcgaaaaaataacgctattatacttattaattcaaaatctattaaaattaatatatataatttacattattaatatatatttatttagtggtagttttctttcacaaaaacgtgaactcacggtgtatggaatttttttaccttattccactttacaaactatgtgttaatcttgtttgccatcattacaattaaatattctaaagaaagcagacggaatttaccaataccttgcactttccgaatttattccgttgtttttcttttttttctttctttatttatgcgtctttcacagaaaacaaaatttatgctattaaacgacaatctcagacaatctagtcgaatttacaaaatagagaaaacgttaagagtattcttttttagtgaggaagtacattggttttgcatcttacttaaattgcacctatcattgaattaaaccagactaaaaaggaggaaaactttaaataaaaaatattgcacaagcaggattaacagtaaatacccacgtataggtatcctttttacacacctacccgtcaattaagtcttcatcaataaaaaaaatgaatctgagattagaactaaccaaatttttaaacttatgttttgtctttgcttctgcatatatgttttgggaaacactttcgttagtaacaaatacacattctccgatagtagtagttttatctggttcgatggaacccgcattccaaagaggcgatatcttatttctttggaatagaaatgaaagagttagcgtcggtgacatagttgtgtatgaagttgatggcaaaagtattccaattgtccatagagttttaagagaacatcacagccaagcagatgagtctaagcaacttcttttaacaaaaggtgataataacgcaggtaacgatattcctctatatgcaaacaagaagatttatttgacaagaaatagagatatagttggaactgtgaagggttacttcccccaattgggctatattacaatctgggtctctgaaaacaaatatgctaaatttgcactacttggcttcttagcattaagctctttggtaaatggagaatagattataatattctaacaatctaaaatccacatgcttattctgtctctattccttatttttatgttacaaaccgtcacatatgcaatatcttctgatatatagtaccaaccagcttaacatgtataattttatattattaaacttaaattagataaattaatttgttatactatttcatcaagtatcggattatcttacgacactactattccaaaatatagtatatctttctttctttctttttcttttttttttttttcaatgaacacatgcttaggaactataaggttatctatcaaacctcatatcaataaaaacagctaaatcaatggatgttgctagtgtaattgattcctagatctaatgtcgtcttctaagccttccaactcctaaaaacgatcaagatgctggattacagaaaccgagacaattccgctatatacgggaaaatttgcggaataaacaatgataaagaatgacaaaaagaaaaaaaaaataggtaggagaaaccaaaaaaaaaagagggaacaactgttaattccaactaactccacttatcgttagtttaaataataaattgtaattgttgtctgttcctacttggttgaagatacggattgttagttttaactctgcattaataaattgtctcatcattcatactacagtaagctaatatttattgagatctttcccattattgcgaattaggattgctgatttccattgttgataaaaataaacatacacagaaatatacaaataaataatcattatgtctcaatcattacgtccttatctaactgctgttcgccattctttagaagctgctctcactttatctaatttttcttcacaagaagtagaaagacacaatagaccagagattgaagtacccattcaaagtgcggaattattgttgcaacctatgcatatctcgcgtaatgagcatgaacaagtattaattgaaccatcagtcaactctgttcgtgttaatataatggttaaacaagcagatgaaattgaacaaattttggtccacaagttcacaagattcttagaacaacgtgcagaagccttctatattttaagaagagttccaataaaaggatacagcatttcatttttaataactaataagcatacagaatcaatgaagaatggtaagttgatagattttattattgaatttatggaagaagttgacaaagaaattagtgaaatgaaattgtttttaaatgcaagagctagatttgtagctgaagaatatttgagtgaatttgtttactaaaaattttacacattgctcaaccttcatccacatatatctcatattccatattttcttttatatacatcactttcctataatgaacaatgcaatgactatgtaaaaaaaatgatataaaatttggtagaacgtataaaataaagtaaattcatttcatattatatatcatatctttataaaacatatctgtttgtattgctgatgttggatccatagtatcacccagccacatagcttgatccgaaatttccttccatagttgattatcacttgaactgacatgtgtaatatcatttaacatttcatctaaactcattaatggtgctgtattatgtggatccagttgatcgacatttttggcaataatttcagaaccaagttgtgttaatggaggtgctgtataagcttgttgtaatgtcagatttatcatatcagacaatgaatctaacgatgttaaacctgtattgtcttttatcccgttagtattagtattactatagttatgatgagggtcagataattgtgtgccagatatcatattattcgtatcggaaaaagaattaacatcttcggatgtatcattcaaaatcgcataaattgattcctttctcttatatctctttaaatcttttgacctattaggaatttcattattttcatttttggaatgttggataatatttaagttgatgccactatagctgctattattgctgttcatactggatacactaatatcatccttactatgcttcaatattaaactatgcaatgtatcatggaagtctagatttatcattaaagttaacaattgtgcacgtcttaattctgctggttgatttcctgcattttgcattaaggtgaaaatggttaaagcttggtctaaatatttgtatgtttgttcatggataccaaatgctgtgttaaataaaagcaaagtacatgaacttgtaaataaatattcacgatccatatacccaaatgtggctaacaatttcaattttaacatataccaaagacatctgattgtattgacagaagcctgaagtgaaaaattcaataaagtagtaatagtattagagtaactctctaaattcaaataagtattattgtttttaaatcttttcaattgaattgatgtaaaatgaaatagcaatggcctaaccaataaatttataccttgaaagtattctgtaaacaaattggctgcaacacggctaatttcgaaactctcatcatctttactaaaatcaacttgagatgatattgataattgatttctccattgaacaagttgtttaaagatgttttggattataggtagaatattcgagtttggttgtctttgatacatttggttcagaattttagcgttgatcctcacaatgttaatgcaatttctaataggttcagctttataaaaactataatgtggttcatcgaatctaatatcttgaggtaattctgtggatatagtgttatctgttaatcccaaaggtaacccagctttactacttgacattctttcgaacatataaactgtccaccataacctcctatgatgttccaattgacaagctgacaatgtatcactctgagagtcaacatgcatccctaataaaagacaggcccgtaatgcttgaccaaaataaaaataggatgcaatggttctatcagccacttgtaaaaatagtgcatacaagagtaaagtttctatactcccctccttcacactacattcaatactagcattgcagtcaatgtaatgaaacaatttggaggcttggttgaaaaaatccatcccaggtaatttcgtatcctccatttgaatattattaaatacacgctttgacattaatttatcttgtaattcttttgtacctaaataggattcccctaatccgaaaataagaaacactttcacaaaccatattgtttgtaaaattggatcaccgttcatgatacctttataaccatcgatctgttcatataattgtttcaatctaagtttttccataccctcattgaagaaataaaaacacccatcaaaatacgttaaaaatgtgtccattaggaaaagtgaataagcatatgttggaaaatgtaaagttgttactactgatgcatcatttataggcaattttattataaacaagaaagataatgtgtctgatcgaagttgctgaattataatttgtaatttattagaaggtgagagatagagtaccgtagaatttgaattgatattatcaccagaactgtttaaagataatgatttagaatgtgcagtatcttctgatgaagagtgtgataaatttctttctgatgggaacggcggtggagttacagatgttgtcggtaaaggttttacaatcttttctgttaaatatttggatattaaggattcaatttccaatccgaataaggtcatagaggaagacccgacaaaatatgtctgatccaaggtggaattaatcaacctcccacttctttgagcaaaagtagatgcaatttcttcgttagattcggttggtttagaattgttatcatctgtaggctgtaaaatatttttctgctcaatcattttagaatcaccaatatttttcattgatttaatctcgtctaattgtcgcaacaactcaatgttttgtcttttcaattccaagatatcatcctgtaaacccattagatatttcatagaggtaactattttcttcttttgttcactgtactcacaagttataccttttttttcacattttgaacatggtgacccaccaggacattttagatgcttatttctacatgatacacatgcatttgctgttttcttaagttttttaacaggagtaggttgttgatctgcagatttcgatctccttttgttattttcattggaatgttgttgtcttttagttggtttatttaatttgttaggctttcttgaaacatcttcatttctttcaatcattgaatattcaatataataatgttagcggattgaactatggaactttataaagcttctttttttgaagatttttttatttatttattttaatcttacctgtattcagtgtattagaaacgtagatacaaagatacgtgctaaaagaatgttctctccaaggacaaactaatctctattacatctttaattcaatataaacaagaaaaaaaaatgaaatttattcatttctacactgatacaaaatttttgcgttttttgtcctttaaattttggatttgtacaatttgaggaggacagattcgtagaaaagagtaatgcaagattaagtgattgcattaatatagacaatggtgtatgtttatattgggaaacatgttgatataacctattgttcataaataaaaacaataaaacagcataaaaatggtccacgtgatcataatatcacatgatcaccaacaaatcaactgaatattttccaatttttattggttaaaaaagaaaaaaaaattataaacaaaattcatgcatatctttttcttttagacgaaattgacttgtgaaagggaaattccgtgattccttctctgtaaaacaagccttttctgtttgctggatgagggggacagaagggaagatggaaaactgtgttatacaccaaaatagtaggagggttgttgtgctgttgtttaaagcaccttgacccagagcattgaaaggagaaaagttaagatattcgataaactaatataagtttggtataactgtattgtaaatagtattgcttgctatagaaagtattttgcatgtgtacattgtaattcgtatattatattccactatcactagaattattctatattatttagagtttcagaccgattaacaatttgcctaattcatttattttacaattatttgtttgattaaactttgtcctatcatttccatccttcagatttctaaaggactacaaaaaatttttaagtaaaatttactcatagtttaatcattatagttgactacaagtagtcaagcaataatacaagtaataataataccacgagatactgaactaaatataatcaagcaatgtctttagctaaatctgctgccaataaattagactgggccaaagtcatctcttctttaaagatcactggctccactgcccaacaactatccagttttaagaagagaaatgatgaagccagacgtaaattattggaattagaacaacaatcattaagtgtagatttcgataaatatagaagtattcttaaaaataaggaagttgttgataaaatcgaatccctattcaattcatataaaccagtccagattgacactcaatcccaactaaagattattaacacttttgaacaacatgccatgaccaacgccaaggaaactgaagtattaattgaaaaagaattaattactttgaaggaaagtctaaaccagattgaaaaggctagaccgtttgaccaattaactgtagaagacttagtcaaagccaaaccagaaatagatgctaaagttgttgaaatggttaagaagggtaaatgggatgttccaggttacgaagaaaagtttggctctttgaatgccatgtaagtaatatgatattcacatttcacgacttcttttttttttccttttttagccttttcatttacatttacctagtctttctttgttatatacatataatttttagttattctttttcattccatttctttttattttattttggattgctactatatctttaccatgtatagccacataatcgccttttaatattctccctgattattgtatctataattttttgaatcttttttaattattttttactgctattactacgtgtattgaattattataacatgtatatgtatttatagtttctctaaatattgttatttttgtatatacgttttcaaagtttctcttttactattttgatctgttacttttcctttagagattgtattactatagaaacagatattaacaaacatatatgaggaaaaagccatgcttattaataacagatcacacacatacatgtgcataacattaaatcttttacaagatccaggtcccagcttattgaaaagtttacgaatattaatacactctctcatttaccccttctactttatacacttaccacacataataccaaaagcaaaaaaatattttaatctcttataattagccactgatatcagtattgacggtatctataaaatgaataaagatttcgccatttcttttttacagtgtatagagcatgaaagagatcaagatgtcgaacaaactgcacaaattctaaaatcgttaccattgactaaattagtagagtctggttatgcaattaataatttgattttacagaatattagaattgggttagcaggcaaaatttatgttgaattaggaccagataatgctataactgatgaaataaaacaaaatgatattaaagtcggtgatattgttataattaaaaataatcaaaaggattcacaaagtcgttccatgcactcaaaaaggaacaataataagcataaaactaaaaataagttaagtgatggtacttctaaaaatacagagcttgaagatatctcctgtagtggagttgtttataaaatgtccaaacagttacttgtgatctctgtagatgaagctcaagagaataatgttacaatgctttataattttaacagactatatattgttaaaaccactaatacaatagtgtataaaagaatggaatccacaatgagaaaactttttgaatttgaggaaacaccatctaatcatattgttcaattgttattgaatctttcttcttttactcctcaacccataacagaagatgtaacctttttcaacaaaggattaaatcagtctcaaatggatgcaattaaattcactctatcaaacgatatctccattatccatggccctccaggtactggaaaaacatatacgcttattgaattaatattacaattagtgaaaaataagaaacagagagtgttagtctgcggaccatctaatatctctgtagatactattttggaaagattatcaaagcatctttcaggggatttattactcaggattggtcatcctgcaaggttgttagactctaatctttcacattcattagatattctgtgtagaagtggagaaaatggtcaaatattaaaagatatttataaagatatcgataacacaataaagtctattaaaaagataaaatcatttaaggaaagaagggaagcatggcaagaagtaaaacaattaagaaaggaactaaaagtccgtgaaagaaagatagtcaaagatttagttatggaagctagagtaatcgtggcgactttacatggatcatcgtccaaggacctatgttctttatataatactgaacaaaaattgtttgatactattattattgatgaagtgtcacagagtttggagcctcaatgttggattccattaatttcccattataaatcaaattacacaaaattggtacttgcaggtgataataaacaattaccaccaacagtaaagactgaagatgataacaaaattaaatcaaaattagaaactacaatctttgacagattagaaaagatatataaggatcaatttaagaatcttttgaatgtgcaataccgaatgaattcacagattatggaatttgcatcacaagaaatgtatcaaggcagactaattgctgatgaatcagtgtctagcaagatacttttagatttacctgacgtgaaagaaaatgacgatactatatctccagttatttggtatgacactcaaggtgatgattttacagaaagtaaggagatgacttcaaaccatagtaatagtagtataaataatattattggatcaaaatataatgaaaatgaggccttattagttaaattacatgttaaacatttagttggtttgaatgttccagaagatgctataggtattatctcaccgtatagtgctcaagtatcgcttttaaaaaaaataattagtccaagttatccaaacattgaaatttctactgtagatggatttcaaggtagagaaaaagaagtcattatattaacgctggtaagaaataatgaaaactttgagattggatttttaagtgaggaaagaagattaaatgttgcaatgacaagaccaaaaaaacaattatgtgttgtggggagcattgaaatgttacaaaggtgtggaaatcaatatttgaggcattgggctaattggaatgaggagaacagtgagctgagatatcctgatatagatgaattatatgaaatgaatgagagttaatttctgatataaaatagcatatatatatatatatatagaaagatgaaaagacaagagagaggatggtgatggtattctatcatatatattatttattaaattatatactttaattattctcatatacataaaaatctacattttcatcagcagtgacaaacatggaatactttggattaaatgctattgtccttggacatgaatcttgtgcagcatttatagaaaccattggtttcaaaactttattacttatcgtattagaatgattccaaaatactatcttgccatcataatcagtcccgacagtaaatttcccatccggtgtgaaacatacagaaccactatccataaactctctgttggggaaaggttttgtcccagataattcaaataaaatttcaccactgaatgaatctaagattagatgtttgccataagacgaccctaccaaaagatatttaccatcattagagaattctaatttattccaattctttttaaagttatttgccaaagagaaattgttttgagtatccaaatttattgttaaaaatgggcctttaatcagctgtcttaaattgtataagccaatctccatggactcagggttacccagtgcaaatacaagacccgaaggatcatatgcaatgcaatttggaactacacttgggataattgcctgggcctttgatgaccttaaatcccagagtcttatggattcatcatacgatgcagataaaaaggtatcatccaaaggggacatttggatatcatgaactaaagcaccatggccagtgaaatagcgtaaatattggtttgtttctaaattcaaatgtctaatatcgaatgatttcatcgttgaagaatagatacattcattttgtgcatgcgtaaatttggcagaatgacacccatatttctttgaaccaattgtgtttaaaaatttacaggatacagaatcataaagatgcatattatcatttgcagctgctgtcaataaatatttaccattatcatcaaaatttaatgaagtgatgggacttacctccttttcttgtaatctgaaagttttaactgccttaaatttagaaagactctcacgatctagagttaaagacattatcagtaaagttgcttaggccggaatatatgctttgtctagttgttactagggggagaagtatatatagtgttaattacatcaggattactttgtaaaatgtctatataatgtattttttacacacaatatttaaaaataatgtctagtaaatcactttcttagtctctaaatattttcttttttttttcttctacaatcttttctttcctggtctttgtgctttcattttcaaataataaaaccaattgaagatctgaagacagagagaaagaaagatgggaatatgatagaaaaaacagtataagacatctatacacaagcatatagttactaaatagtagcaaaatcaacctaaaaatatatatatttaaagatgagttttggcagtttattcagaattggattagaggttactttggtgggaatgttattagcagctgttagaagaaacacaggttatatatttgcgtatgaaaaatatggaatagctaaatatatatacaatttcttaagttatggagattattgttatagaatgtttagtgattattgtaggacaagttcatatttccgtaaagtatccaaagatcttgattagagaaaatgaatagtaggaaaaaaaaaaaaaaaaaaaacagaatatttccatatactgttcctagatatatatattcgtaatgttaactatcacagtcatatatatatatgtttatgtatgtatgcatgtatttatttagaggggtttaggctgataataatttaattttatgattccagtaattctttctaatagggtcatatttgattgaaaggtatttataacataactcagacatctgtctttcacccttcagtgcatatatatcagctaaaaactctaatgcatatgaagattgaatatctggcaaactcgagatatccctcacttttgaatttagtggtaaattcgatagaaattgcgagataaaagtttcaatattgtcgttgctattattattggtatcattcaattgatttgatggtaagatgtttagtaatccatgtagataattccatgagcttacattttgtggtgccaatgaaatcttagttttaacgtagtcaagttcctgcgagagaaataaaggatctgggcggatctgttttaggtaaaacattctatggttccatgcactgttattgtaaacatctctatcaatcatgttattgacgaaacttaattcatttgtataatcgccaattaatttgaccacccattttctatacgaccacacatgataatttttggtatcatcattcaacattatctcaattatgggtaattcgtgttttagtgaaggttgttcctttattaatttagttaagatagactgtctataagaccaaatttggtagtttttagggttgtttaaagtgacttgatccaaccaatccaactccttcattatgaaaaagtcagaactagaatctacaatttgtttatgataaatcaaatgagacaaaatattgaaacggtagttccaaattgtataaaatgcaggaaccaaattgattagctgacttgttaacctgaatgctcttacacttaattcattattagataacatagatctagccaaacccatcaattgtttatattcatcggtatatagaatcttgcataattcatcattaccgagactcgactcaattgtcattggagtaatatcgtcataatcttgaatattgaactctttataagattcctcttctaatgacatcttctcaactttctatcgagttgttaagctctattgttgttgatatcacacttataaactcaagaattaatcacaaaaacacagatacatatatttccaactctctgctcttctctaaaagcaaacatgacgcattatatacgacatcttgaatatatatatgtatatatgggatagatagatagagaaagagagattgttcccccataccttttttcatgatttcagccattgtgaaaaagaaaagtttagggtttcctcgttttttttttttaatttttatttttatttttatttttttggtttcagcctgaaaccctaaactaaaaacacgcagacatttgtcttgacggcataactcaattccgcacgggttctgtttgcgaataatgcggtattgaacgcgggttttccgacatttggcacatggcaatttttttttgccgcagccatttgtcgttacagtattgtttgtcgttggagacggcggtgagaagagggacaaatagatcgatttgtctataaaacaagagatgaagagtaagagaagctgagtaaaaagaggcctgttggtaaacagacagtgggagaaggaagctgggtaagtgaagttaaacaagcgtgtgaatgttgcagggaagataaacggtttatgaagagtcgagaattaaaccacttcatattctctgagttatcttttattaattttttttttgattattttattaattcatccattcattcattcatcaattgtctcgatcgttaatcaatatagtgttaataataataataataataataataacaaaaattgaagataaatttattagaaataatgattaaagaagagactacaagtataccattaacaggagatttagatgcaaatcagccttctttagatattaatgataatctcaatcagatgctgcaggatttgatgaatctgccatctacacaaaatgaaataagtcatgatagtgctgctaatattacaaccactaataatcccaatcaaaactataatggtgttcccaagaatatagattatgaacctataggaagcaatattaatactaatgacaatatacccgctcctaaggatttaactgacaactatttaaaaattaaaaatatcttttctaatattctatttggtagaaataaagatattctccaatcaaatattcctgatccatctgtctatctaaatattaattcaaacaaattacctttcatcctaaatatttttgggttacctcacatatccagagcagagaaccaaatgtacttaactctatcactgtcacaaaatccttccatagaaaatagaaacaatattacccataattgcaattatccaatttatatccacttaccaacaaattcgatagcaaaagaaaaattctatttaaacgaaaattatgaaacgttacaaaacttacctcaagttttcacagatcgtgtactattcatcgaggctttcttattttcaactacaaatcacgatttgatcaacgtttgttctaaatgtgttcttagggaaaagaagaggtattcaagaagaaaatcaggtctctgcgataatatcctatggtgtaacaatccaaatagaaatgctatcttgttctccagtagacaattattccctcttcaacggcacaatgttagatatcatcacaccaatggtcatataaaagagatcaccatcgaattaaagacaagaattacttgttattgtaagcatcacacgaatacagacagcttccagattctttttgttatcagagattctaagaataatattttggctaaagagttatccgattcaattgttatcatgggtaaaaaaacagaaaaccctaataataaagtagttattacaaatagcactcgagactttgctcttaatgtcaccactccagatagttcaatatctaatacagattctcctatgacaaaatcggcggttaaaataaatatcaaaaattatcctcttccatcgccagtatcatctttatcctctgtatcttcgagttcttctactaatggtgaagattctaattatgataatttatcaaataattgcggcaatatacaaaccgaacgtatttataatagtaacattttttataaacaagaagaattaataagtaacatgaattttatcacaggaaacataaggtcaatgaaccaaacaggtaactttaatcaacagaatggtgtttctatacccatcacaaatcatcccagtgttaactctagtacgcctccaaatcatattagcaattttaaccgtagtcaaatgaataacaataataataacagtgatataaggaaaagagtaaaacatagtcgtgaatataacccttctttgtcctcttcaataataccattgaataatgacttaccttctaattctcttttaagtttacaacaattacccaagtctatacaggataatgtttataataaaaggaaagctgatacttttgcatcttctttctcatctttgccaactttaattccttccatccataaaattattccatcacaaggcccgacatctggtggtattgaaataactttattgggctcaaactttaaaccaggtcaaattgtggaatttggtaataatcgagcattatcatcagaagtttggaattctactactatgataacgtatttaccaccatcaccaaaggcaggacaagtgattgttactataagagattccgattctagagatacaaataaaaatagtgtcgataataatagtaaccttggaacacacattactggaaacggtgttaatagtcataatatcaataatgatattattaatctgaataatggtccaatattcacatatattgataatactgataaacaaatgattgagttagcattacaaattgtaggtttaagaatgaatggtaaattagatgatcccagaaacattgccaaacagattattgatagtacaaattatgggtggaattttgaaacaagtggtgcttcaaatagtaacaataatactaccaattattctgtaaattctgcttttaacaaatattcggaaaatactgaattattgttattagatataattaataaatccgaaaattttaatattatgttaagagatgaaatggggagaacattattacattattcatgtctaaaatgttatgtattattatctgaaacattaattaaagtatccgattccaaattatgtgaaattagggataattttgaatatttacccgtgcattttgctgctgttaatgggaaccatgacataataaatttaatgaaaaaggctaatgtatattctaataatagtaacactattcttaatggttatacatgtagagatttatatattattaaccacgcgcataatgatgaaaagtctttttcagaatggtcagaattagagattgaaagtatttctgaaaatatggtggtggatcgtgaaggtgtatcatctaatgtgagaaatgtccatggggaaacaacaaatgtagaacaaggcgaatcattatggaacaagctgatgcataaattaaatgatgacattctaccaaaatatgaagacatttttcccaaagaatatattgattattctataaatggcaagatgaatcatataatggctactacagaaaatgttaacacaaaaatttcgaatttagaagcgacaatagtcgatgaacatagggaacaagatgactacgaagatccaactgagaataatgaggatatatttagagaaatattgttctttgagagaaatgacaatttcaaaaatgacagaatgttattatacttttggttgccacttttagttttattgtcctcatttatgttattgtatatcatggggaataaagatgactggatccattatgttaatgacatagtttccaattttttcagaggtatgttaactaaattgtttgttggtagacagagtatgagcacttcaataaaaaatcgtttgtctaacttccaaccaagtaaacttttggaagattttccaaaatccattgattttaaactagctgtttgagatcatgaagacatgtaaatataagtgtgtattggtgtttatgtatattttttctatagtgactaatcattatgagtaatcaacaagttcaagaacaaaaaaaaacttcttgaaaattaagaattgaaaaaaaaaattttagttatatttacaaatggcataagcagctcatctgctacaacttcaaaaactttaatttttgtacagcagttataactaacgcctagaggaagctcgatcttatcatttagcaaaaaaagtgaaagtcacgcaaatatatctatccttttaaaggggaaaatgagcaaaaatcaatttagaattattgtcggttcgtatgagcacaatcttttatgcctttcgttagatctttctactacaactaaaccaatttttacaccaatcttccattttcaagctcattctttaagtattaaatgtttggatatatcaaagaggtatttagtgagtggttccaatgatgaacatatcagaatatatgatcttcagaagagaaaagaactaggtacattgttacagcaccaaggttctattacagcattgaagttctctcaaactgaagataaaagtaacaataaatggttactatctgccagtgaagatcataaaattattatttggagagttaaagattgggaaaactttggcacattaaaaggtcacactgcaagaattaatgatttagatattcatccatcatctaggattgcagttagtgtctctgatgatcattctattagattatggaatttaatgactgttaagaaggctgctgtgttgaaattaaggaaatataatcagaatgggcagtatgttagatggttaggggaaaatggagaatattttgcagttgcattgttaaatagaatattgatatattctactagtgatgccaaggtacattatgagttagatacgggtaaaaagactattttgcatattgaaagagttcttctagatgaagctaaaaatgaatacctttgtgttgggataagtgatggtagtattcaattttatccaacgaaaaaattatttttggatgaaccaaatattaaagaaccagagttctctttacttggtcataccaatcgtgttaaggatttccaattttaccaaaatgaatttggtacttatttagtgtcaattggttcggatggtagaattgtagtatgggatatgaaggatagagaacaaattgcagtatatgattgtggtgagaggttgaattgccttgcagtatgcgatgagtctattgaaaagtacgagacaatgaaaaagaggacactgttggaaaatgtggaacaaagtgaagccgaactgagcgatacagaagaattgaagaaagtgatgttcggtactaaaaataagaataaaaagaagaagaagagtaaaggacagaataagagacaaaaggtatctgttgaattggaataagactttcgattgtgtaaaaatatatattctctagaagttatagtgttatatatttttccagtttatgtgtaccatttataaaatataatcatccggatttttcaatcaagagagggcagaagaaacaatatttttcaagtaattctatattttctagaaaactgtaagaacttctaatttctacagtgtgagatatgtttgatattaaaagttatctcttctagtttaaaagaatcctaggtgtgtatgtaataagtacacgatgatttttttggagtgaagagacaagggattgccaatcaaagtaggtgttgttgaaatagaatgttctagaatgaaatagatagaacaataagatattagcagacactaaacgataaattgttgggtaataattgttgagaggtcaccaaaagttgttgagtttgtttattaaatatcttactgttcgtagaggaaaatggcttaatgttaacatatataaagccaaggatttcatcatacatcatttttttcttatttacaatctttgtatattattatttctatgttgtatatagagaaagaaagtgaagaactttattataattttgtgtactaaatctatttaatatgatattgagaacgtttactatatatccaatgactacaggtactcattctcaacaggtgttgtctacaaatatttacgtagatatttctatattatcaacaaaactaacatccacccctccctttttacatttccttgtatttctctgttttaatattaatctttaagccaagaccgtgttattcgttaatctcttaagttcccctcaaataacttttttaattttaatgttttaggaaggaaagaaagggaaagagaaagtgtgtatctgtgcaatagggagactgtgtatatacatgaaagaattggtgcgtaatatgttacaagatcagtaatataggtaaaggggtggttgcaattttatatattttgttcatgaattaaggacttcacaaataataatgataggggggggggggggtgtaattatttcttttacttttatatttttagttgcaaaatattgcgacctttctcttccaaattcaaatcttttaattgtatgaatactatcctttagtacttctacattatattgtagagatatttcaaatttttatctttttacaagctaaaatatgatattaacttccacctctcctaaaaggtaattgctcttagctgactatctacaaagtcaaattcagattattaaaactgctacatttaatttcttttgtgttgatattattcagttagctattaaacatttcatattaaagtattatccactagtttctatttattccttggtcttccttttttttaaactatttaactagtgataagatttatattgtgtctgttaatctactcttttctttaataataacaacagcaacatagaatatgtctaccatatgcaaatttccgctagttttattcacagtatattttacaattgcatattcttcaaaggttcaaatagctaataataataagattaataaaggctatattgactttacatttaaaaagaaatatggggttaattatgatactgctacaagtcattctaatgtggaattaaatttacagaaaagagacactgggtttgaattagtagaaatcacaaaccaacaaagtttttattctgtacaattaaatattggatcgccattccagcaagttgaagtgttagttgacacaggatcatctgattcgtggatcactggatctgataatccatattgtttgggaaatagaaattcacagattttaccaagcgatcaaattgattgtagtcaatatggcacatttaataaatcagaatcttctacttggtcccaaaatgaaacagctccacctttttttatatcttatggtgatactacatttgcatcaggaatctggggtcaagatcaattacatttggaagatattaatatcactggactatcatttgccgtggctaataggacaaactctactgttggacttcttggtgttggtttaccatcattggaagttacaaatgctggtagaaatggttaccaatatgataattttccaatgattctaaaacgttctggtgctactcgttcttctgcatattcactttatttgaatagtttagatgaagaacatgggtcgattttatttggtgctgtagataattcaaaatatactggttcactttacaccataccattaattaatactctacaaaattatggttacgataaaccaattcaatttgaagttactttacaaggaattggtctttctaaagatgccaacggttctaacataactttaaccacaacaaaaattccagttttactcgactcaggaactactctaacctatctaccaaaacccatccttgattatttagcagataatattaatgccacttttagtcaaaatcatgggtattatgttgttccatgcaactctgatggaaatagcagttcatcttttgatgataatacccacttagtctttgattttggaggattccatatcgacactccattaagagattatttaattaatataagtagaaacaggtgtattctaggactaatacctcaagattctaattctggtattcttggtgacacatttttgtctcatgcttatgtagtttatgatttggaaagattagaaattagtatggctcagaccagatttattaataactatgacgctgatgatgctaagggaacagacgttaatattattgatggtagtaatgctgttcctggcgcaataaaagctgcaggatactctaatacttggtctactacagtaagtacagttggctcctgcggcaatatctttacattgcaaccacatgttacagaagttgattcacaggtttctgttacagattcgacagcaatcacacctaccactactactctgagtatgacagtatcaggatctacttctacatcaaccaaaaaaacaaaaaattccgccatcaaagaatctattgattactcaaatttatcagggattattttcttaagtattgtttacctatttaacttgttctgatatttcagagaagaaatattataagttaaacaaagagaaaaggtgctattaaaaaataaaggacaattttttagtcttccacatgatctcaattttaacatgatgtagaaacaattaatatatcttccactctaactcttgctatatatacatatatatttaataatattagtaacaaataagtaatataaaaatattctaaacataataaatcttgcaaccaataatctaacaagaacaaagattatattatgtactttattcattaaaaatggttaattttgtcactctaatctctgacagtgtcaaatcatgatcaaccttttaaatggaaaggctagtaccaaaaaaaataaacactggtagtaatatgtgtaaacctagtaacctaaattttttttacttgattttttttttgatttatcaattagagtggaaaatttaaagagacaagagcaaatataataatatctccctccattctaactagaccgccaaacatcttttatgccctcgatcgaagtgataacaccgaaaaacgtaattaacaaatcatatccttcaatcaaattcaaaagtttcaaaactacaatagcatctaggaacgttagaattatctttctgaatactaccgttatctgacaataatggattcttaagtgcttccttttagtttttaataaactattattctttgtagaatttatcttgtgaaaacttttttttgttaatctaatatctttttcatgtgcatagagataacttatattaattgcgagcgtccaaaataaagtagataaccaacaataattagtgattttttgccatttctttgacataggtagggataatactgtaatttcaaagcattgtaatacattcaatacgtcaaacaatttccataaaaacaaagaataacacttaagtaagatcatccaggccattaaagaccactgtctaaaatgttcttccgcttttacaacttgattaaaggaactaaacaatttaaatatactaatgcatttaaataaaaacctaaaatggcttgttaaatggttaacaatgggtagccctatgtaaagataaaccaattttgaactatattggcctaatcgaaatagcttctctaaaccttcagttttagatacatatacatcacatttagtaataaattgactcttcaatatgcatttaaacatcactggcttaattataggtaatgcataactctatttatacgttcttgtttttctattatgaatttatataacaagaacataaatggccccccttatcagtaaaatatcagaaaatcagagtttcttaaacttgattttttattctattttagattgcaacaataagaaaaaaaactcttaaataacaaacattataaatatttcttagacagtgtccaaagaatgtgtattattaatattaagaatgttggcccaactgttattatggaattatatacacatattttattatctaatgcatttaatcatattctatcttatactctgtttaacatatatactttctgtttagtctatacttatatgtatatgtacaaagtacctaacataacaacattatgatgctaaaacatactatgaggtctgtgtgagcgatctaaatgtggattcaattaaatcctttaactctttgtaactgataataatacaattcatttcatctggtgttactaagactaatttttccgaagctccagcatctaatttatttaaacatcgtaaaacatgagtcaaatccatcacaggtttacctgtttcatcaacttgatgaaaaacaaaatcataaaataatataatagggaacttttcacctgattcagaccaattaatatcaattctcgattcaattctgccaaaaatgaaattcaatttgcaaattaatctgaatagtcttgcattttctaattctgtcgctaaattcttatttaaaaattcatcatattttttcaatgcattaaaatttgaatataactgatcgatgaaaagaactgttaaatccttgatatttttatctttattattttcatcaattaaatatttcaaaacatctttaaacgaactttcgacttgtaattgatcaatctctaaatcatctttatggatcttgcttattttattttccactgataatgaaccggagttattattattattattactatttccatttccactattagtagatgattttatattggatgctagttgaatcaataatttgcctaattttagataatccttttgtttcaattcttgcaattcaagaggtgttttatttgaattattcgataataaatcatttgcagctatactggaaatttttattatcgcagggttgtttgttacaataatcttttcccaattcaacagattccccaagatcaagtctaatttatgcgcagcattaataccattacttaactggatcaaatatgtccaaagatattcttgagtaattggcaaaagtgggaaatttataaaatgtgcttcataaagagagatggcctttggataataatcataaatcaaacatagagatgagtcattaaattttgtagtaataaagacatctttaattgaaacgatattaacattatgcaattttttccacatttggaaaacctttactaaatgatgtggatctattaaatttgatgaaatatcatgaattcttctcattacgtaatttctaccgtcaatatttgaaaatactttatagagagagtttttgtgacctttatacctgtcaatgtcagttttcttttcatgaaaatctagtggtacaagaccaaaataatcttgaaccaaatctggtaatggaccaccaggtgggaaaatttgtagagacgccaaattttttttaaccaactgttctcttaaatcatttggaataaataagtcatccggtgtcctttcatttggtttcaatgagaccttcaactcttgcggtgtatctgggaaatacaaatggtattgtaagatgctatgtggtggtggataaattgttgggtaattcaatcttaatggaagtccttgagtagccatagagttgtcaattgttgtggttgtcaaagtattagtcattagtgaacctattcgattagtgttattctcgttaattggtaccatattatctctgttatcgatatttgttgctgtcattatatttgtagttgacatatgcggaaacgataatgacggcattacaaaattacctaattgttgtgattgcaggttttgagatgtttgtgtgagtgacggaaggttaaatacaggagaagaggataaccccatctgattgaagctatctattgtatcaggattgacattagtagaaagattagatatgggattgatattattattactattgttattgctaccgctgttgttgttgctgtcattattgttattgatattgatattgatattgttattgttgttaaaggatacaggtgtattaggttttgtatggttatacttatcgattgataaactggagaagttattagccagagggatattgttattatatgaatccaagttatcattaccaaatgacattggggtaaaacttgcagcaaattttgcattaaatctggtgaaagaaggtgatgatgtagtggatttttttttattatcattggctgggttattcaattttgtcaaagaaggtagatcagataaagagatgccttctgcaggaccaataatcttagcagatggtatatttggagtggattctttcatatagctaatattggcactatttgtgttattaaaagggttcatttcatagtcattattagtgtgtttattgacatttgaatgtggtggttttattgtgacagggtttattataggagtgctgatattgacgttgttaacattattttcatcctcatgtttaaatggacacccatctttttgttttttacaatatccataaattataacgtttctacatgggatctccttagcccattcatgattgattttatccatctagagtgcaatataaaataatatatatatatatatatataggacttaaaaaaaaaaaaaataaaaacaataacaacaataattaaatatgtacaaattatttgtaatactaatagtaataatagtagtagtaatagtagcaatagtgatagaaataatggtaatggtagtgctaaatgtaaaaaaaaactagtttgtctatttgtctatttgttttttcttttttatttttttttttgtttttaatcttcttcttcttcttcttgtttatagaccttattttctgtatggttctttagaagaggaacggaaagggaagaggaaaaagaaaagacagtaacgaatatcaacagtaaattataaacatataaatacaaaaacttatatttaaaattataattataattatatttgtatgtatgtatatatgtatgtattttatgacaattgattgatgactatgtatacatggtgttttaattcataatacagtaaaggatcatatactatcatgtcagtttgatttgcatcctttagatgtgttcttttgttttcttttttttttttttttttgttttttgttttgttttacgtttctcagttatttcactttttggtgcaagttggaaaaaaggatggccgtcaaccgtgacttacacgaaaggccatgtcttgttattccagattagtctctgtgtgctataatctcattacatacgaaggtgcaaatgcacagcactatgaagacaagagaagtgatcgatttacaacagtcgagatgtttgagacgaaagaagaaaaaaaaagaaaggaatggaaaaggaagatagattgacacacatacacacacacactctttttttttctttccttctttctttccttacataactcctactatatcttccaaccagagtacattaaaatataaccgtatatgtagaggatgcttaatacggtatatgtatggcttgttgaattaaaagcattaacactctttgcttgagaagtgttcttatatccaccacaatcacttcaaacggcgacaaacagtataataaaaagggtaaataatactggagagtatgtgttttctgtgaaattgctattataatttctgcttttgtactttttttggcgcgcagtcaaattaactttttcctctttttctttttctttttcttttgtcgggaataaaacaagaaaaaaacaaagaaaatgccactatgaaaaatttcttagttttcaaacacaccctacctggtcgtcaatcatgatcttcaattattgtgagtgcccgtattgtcctcccacatccttctggttgaaatctcactattacaatcgcacttactaagtctctctctctctctctctctctctgtatatgtctactttaatgtgaagtagtaaatgttgaggaagagggatccccgagtcagtcagttaatcaatctgtgttcgtatgcgtttatcttcactccgatgatgcattttactattatgatctcatttataattaacaatatgtaactagctagtctcaccctcttgttctttcttcttttcttttctttttcttattcttatttatattaccattgaagatttctattgttgttggttttatatcatactagtataatttccatataactgaaaaatatcaccattcatcaatccatctctattactatcattacaattacatcctacacacacatacatacactcactcactcactcactcacaaaaggtaatatatatacatatatacatgttggtgctaaaatcttcttgactaagtctttccttttgcttgctttttaaaaaaaaatatagaatatatttgtaaagatagataacaaaccaagtgaatatatatcttatcattatttattgcattaaattgccattaaattaaatcgttattaacataaaataaaaaaaataaaaagaatggttgataaagttattattgtcactggtgtgtctagaggtattggtagatccattgttgatagaatcttcactcacagtgacgatgccgtcgttgttggtatcgccagatctgaaaaacctttactagatatcaagaaccaatatggtgatagatttgaatttgtcgttggtgacatcactgactctgacaaattgaaacaattagttcaattggctttggacaaattcggtaagattgactctgtggtggctaatgctggtgtcattgagccagtccaagatatctttaatgttgacatcgaggcttggaaaagattgtacgatatcaacttcttctctatcgtctccttagttaacatcgccgttccatatttagttaattccaaggataccaacatcatctttgtctcctctgatgcctcggatacttacttcagtaactggggtgcttacggttccagtaaggctgctttgaaccatctagccatgactgttgctaaagaagctaagcatgtcaaatgcttgtctgtggctccaggtatcgttgatacttccatgcaagtcaacattagagaaaatgtcggcaagaacatgtctaaggaacaccacgacatgttcaagaactttcatgctgataacaaactattagaccctaatgttcctgctaacgtctatgcccaattggctttgaaaggtattccggatgaaattaatggtacttatatttcttttgattctgaaaaattaaaggactatcaaatataaaaaataaaaaaaattaactaatctttatgcataacacaactaattcattattgttaattaattaaatcattctatcaaaatagttgagtctatatatatatatatatatactttaagtaaatattatttatagaaataaatattaaaaaaaaacataacaaaaaagatcaatttcaagatgcgctaagctatttcatttttctttttttgatctatctatctattatataatattgtctcaaataatacaaagtttgatttttctttttatgttttctttataaataaaaattcatatatataatacttgtataaaaaaccaagtttatattctatctttaatgccttgttgaacatctctataaacagcctcaacagattgatcacaattaatctttacaactttattcttttctgcaaacatattaataacaggcatactagtttcttgaaaagttttaaatcttttcttaatcgattcaatgttatcatcaactctgccactggtcttaccacgttccagcaatctcttcaacatgacatcttctgggcaatcaaaaaacaacacgaatttgcttggaacaataatttgttcaaaagtaattgcctggtccatctttcttgggaatccatctacaaggaacttggtgtagcccttatcgaagttgttttcgatacttgtttttaaaagtgtgatagtaatctcttgtggtacaatcaaaccttctgtaatataatggttaattaaggccccatattgagacccctcacgttgttgttcctcacgtaacaaatcacctgcagacaaatgaacaaagttgtagtcttcaaccaatttattacattgggtacccttacctgcacctggaccaccgagaacaaaaaccacggtgacctgttctggagagaatcttggaccctttgtgatatctaattttggtaattcgatttgcatagtcatagtgatcaaaataaaacaaagaaagaataatgaagttttaaatcaaaaattcccaaatatttatttatatcgatatacaggtataacaatatactaggagatacaactaaagaaaaagagcaaaaaagagagaggaccgttcgtatttttgatcttggtttcttagagattgcggcaatttattccaaaaactctctaggtttaatgtctttcctttcgtaaaacacagaaacaacacttgtgacaagggttaacccagtgataatagatagagttctgtacttgtttctctttcttggtttgttgttctcatcgctgttcttatcattacttttcttgttcgaggaatggaatgtcttcaaattttttccagcggtggaagaatatttcgatatcggccacaatcgagaattcaccgttttactgtttaaaataacacaattataaaagccatggagtgatggtattatgtcctgtaaaagtagtggtctgctggctgtttggacaaataatatatatctgacagtagctgttgacatggttaacagtgtctatgtgatttggaccactgtaatttgtgttcaatcagtttgtgtttgtgtttgtgttaatggctttttgttcttgtagggaagagaagagcaaactaattgaaaacatactatctagtctttttttgttaggtcttttatctttatttttattctttttttaaaaactcaagataatattagggtttctctcgttttttggaaaaatgttttttttcctttttccctttttttgcctgttttgttgcttttgcttttgaatttcattcaatgcgatgaaaactttttttatgctacacgggttggcataaacaaaacagaccattcatcagtagatctgtattggactaacaacgatgtaattcaataatacctttgtattcacctgtagattcataaatagcagttgagaaaaggaaaaaaaggaaaaaaaaggagagtattcaaattggagaatcccaagagattcgtgaaacaaaggataaacttttcaatttcaaataatagttaatatagactctagcaagaatggacgactgcgagttagtggagtttttattgaatgatgatttcaataaagaaaagaaccttttaaatggacctttggatgaaacttcgaataacatagacaaaaacgacaacattagcaaggatgatggtaataataagaagaagataacacaagaaaacttaagaggtagaaatgatttgaattcaacaaagaaagaaaatgatgataatgagattactatcaccactggtattaggaatgtatataagaaggagaaggatgataatacagataatttaagttcaacagagtcagaatttttggatgatttggataatattattatgtcaacaaactttactgaaagttctaaaagaaataaaattaaaaaagataaaaccataaaagaaaataatagaaggcataagaatgacatcacaacagaagatcaatccattcaaaatgaatcaaggtcaaatatattcgcctcaataaacgaatctgatctaattgtactgaatgcagatgcacaatcgaaaattaaactaaatgatcgaacagccgtaattaaaattcaaatattcaataatgatactggtaagcttgataaagagacgccctttagaataattaatgctgataaattagtattgaaaacttttaaatctaaatctaattcaaaagatggatcagagaaatccagtaaaaaatgtgataataaatctaataataagcctaatagtaataataacaataaactttcctttcaatttaaactaactgcatctgatatgactccgaaaaagatcaatacaaataacgatacatcacaaaatactataaagaataatgaatatattgatcaaaagaataagataaatcaaaaagatagtaaaactaaaaaaagaagagataagaaaaaaaatatgaagcaatcaaacaaaactagcccaaagaatatggaacagaagaaggatagaaataactcttccagtcatggaacacagaggtcttcaaaggagagaaagaatgatcgcaagcaatctgatagtactcaatctacactaaaaagaaaaattgatgactctactacaaaattaagagaaattatggaatcaaaagtcccaaccgatgaatattcaagaactacaatcgagttttgaaatgtccttcattaatgtaaaacattgaaaaaataaagatgaaaacaaaagatacacaataacaccatgcctctttgatgtttcttctaatctttttcctgtaatattatgacaatctctctttcatcaattatttcatttgcatgcaatatattgaatatattattagttactatagtttatagcgaatacgataaacaaacttatatatgtaacattctattatttgtgggcattcttgttctttttttaaagacattattattttattcgtaatctattcaacgtccataggttcgatatagttatcgttgatactggtattattgttttgttctgtggaattctcataaaatggccgtttactagatctacttctagatttttttaaatatggtgacggctgtaaagctgggttttttgatctttttcgttggattttattcactatttgatcatttatttttgtatttttatttaatttatcattatttggatcatattggtctatatttaaaatcaaattttcaaaatttgttctcacagataaaagatgatcaccattcagcgatagggaaacattcaattctaaagcatgttgtaacaaatcagatgcatacttatttgagggacatactgccagcgatttatgaagatagtcaatagccttctcaagttgatttgtctttaaatacaaaaaccccaatgtacaatatacatctgagtccttttctgaatcctccaatatatatctgaaacatttaatagctctttcattttcaccaagtcttttatatgtatgccctaaatttgtttgaatggagatggatgtttttgatgttggactgacatcctttatttcttctaaagctctattcaaatattttttagatttatcaaattcttcctttttataatacagacatcccatttcatttaataacaacggatcactaggacaaatatcataagatagattgaaatattcttctgctaatgacaatgtgtttgaggtcatatattgcatcccaagaaataggtatggtaaatgactacctgggaaaaatcttgcagctgtagaataagctgctaatgcttgatcttgttcaccttcaagagcatacgtgtgtgcaaatcctagccatgcaggtgcaaaagtaggatccaaaatagatgcctttgaaaaaaattttctagcttgattaattttattcattgtaagatagtatgttgctacactaaaccaagtaattggactcttcggtaagttttccgctaatttatgtgatagaagaaataatttattttttgctgacaattcaaataaacaggtaatatatgttggcaaaagcttaagattaaatgaatcttttgataaatattgttcacaaacatcaagacactcatcaaatttacccttaagatgtagaagttccacttgactacagacaacatctgagttcgagtctaaattatactcgttggaaagtaattgttgtgattcccttattctatctgtattcaccaatttggaaagctttagtgtgtagaaatttctgattatttcttcattatcatctagaatagaaaagtctaactcatgaataaaatcccattcttcttgtggtgtcaatagatacttacttgtcaaagtatcaaatgcttcaaaattcttaatatccaccttaactgcctctttaaaagattctctggccttttcgaaattatttaatgcacagtagattttacccctcaggtgacaaagtgatgactctaatttaatccctccatctgtcttctgtctctgttgagtcataaactcatcttcacttatcgattcatccgcaaatggattagtttctcccacaatatccaaggcttcttcatatttttgtaactgaacataacaaagggctaccagatatctgcacatgatattgattgtaactagacttgtagaaggaagattggcataatctaaatcatctgtgcttgtagtcgtcaataaatcaatcgctctttgatattccatgctatcataataaacctgtgccaaccaaaatgcatcatttggatcgtttgttatgctatatatcttatctccaatatattctgcagtagtatacatatgctgcatcaatgcatcgtgtctccaaagtcttaacctttcaatagaagataatttcgttaaatctatttcatttagagtagttacaggtgctgagtttgtagtcaaagtagttagtaaaggattatctttattaatatttgtcttgtcattattatcaatggctgaatcaatagtcatatcattgttataacaatcttgattattattatttacatcttgtatactaagattcaacgggtttttgtgaagactgaattttcgcaatgttgaagacatgatatgatttggggctccaattgtgttatttgatacattggaattgtatatattattgaaggaaatatttttcgtctgtcttggtgtcgttaatcctgattttgaactaaagtttttcgagaccttttgaactaatggactatttatcactgtctgaaatgggttattattgatattgttatttgaatttgaaaaaggtatattatttaaattatcaatattggtagaaggttgattatttgaatttcttccttggcaccttgcagttctattaaccattaaaggagagatagccagtgttgaattatgttgggagggtgtcccacctggggaagctggatttctcataatgtactaaacctattttgaaataaattagtggtagtaataagaataataaattatgcaaaaaaaaaacctatatccaaataagaaagactttgatcaaattgggtatatgttaatgtgttgtatggtatttcagaataataacgatttatgtttcaaaagtacagttgaatcttagtcttttaaaacagataacattatgagaataccttttttcttgtgatcatctcttttaaaaattaaagatttttttttttgataaagtgaaaatgtgaaattagttatgacgcagtgttaatcaacctcgtgaacaattgataatacaagtatcgactccaattctagaattttctatcgtaataaaaattattaatagtgaatgctttcattacttcagtaccaaatgttgaaacaaaaattattactaagataagctcttaacttgaaacatgtatttgcctagactatgggataagaattgttactattactttgctattcgattcatcagaagtttttgtaattaccacttctactgttattattgatacctgtttaactttaactaaaactacatataatacttattattataaggtaaaatgaaggccctatttctaaaactgtcaatatgataattaaaagattaacacgataaaatggcaaattttaaatcactatttatgttaaaagcagttttagcagtgaatctcatttagattcattgaaatcatcgagcaaaaaagtttcattttccaattatgtcatagatgaaatatctgttttgctgttgagaaatgttaaaaagaagtcttaatttacaaatttaatactgataaatttcatactctagacttcagatctatgaaaaaaactatttttaccttcaatttgatttatgaaagatcctgttgtttcatctccctctttctatcaaaataaaaaaacacaataaagaatctgtttgagacctttagagatcttatacaaagtttgcactaaaattgttgtttatgttactcctttaatgtataaaacagctaaacaagctaacaacgctgtttatcttactgaattgtatgtaattgtcaagatactataacaactagcaaattctttccttttacttccagcttcttgtcttattggtatcaaattattagtgtatttttaatgatgctatatcaatatcttcatgtataagttttcctactataaccatcgtagtaaccattattacaatttgcagctatcaatgtttttgtttaaaaattacagattatggcaacattataattacatataacaagtcaaaataatgttattccagtctccagatttgttgaagatataaaattctatatgatagaaactcaagagtataatcaaaatattttccaccttaacccttgaagttgcaattaatactaatcttaaacaaaataatgttgaataacatatatctctcatttcttcaataacccataggttttgttaataagttaaaaagtttgagaacagtattgttttaaaaaaggtcggactgtctgtaaaataaatgcaaaagaaacaaagtacgtctttagaactctataacatttttctttaaaaggtaagtaaatttagcatatattgtcctggtgttacggaagatgatcttaaaaattctttaattgacgactacaaatgcaactatatctgtatatatgtgtaacttagcttactccttgtatacagtatagtctatgcatcatgtataatggacaacaatcaaaaattatttattgtattctatactttagaaaagtatttctttcgtgataggtgaacacctatcacaattgaatatctgctcattgtcacaatgttgtctcaacagataggactcaaaaaacaactactcaaaatacagtatattttgtttcgtgctactacttttccaatgataatccaataaatgttgttttatccttatataaaggtgctgactgtactaaggttcataggtatataacaatgaactctatttagagaaaaagttttataatgatccaatttttaatgagaccttctttagtataaaataaaacagattaataaaagtgcaaccattacaaatgaaatacattgctagaataacaaatatagttctcacagaatgttaaatgagctttccatttatttttattgatttacataagtgctcatcttaatattaaatatctaagcattaaaaataatatcttttttctcttcaaagctatgaatgaaaaaccgaatctgcccatcattgtaaaaattttaggatatttattacctgttagaaattcatacaataaaatttaaagctatgaatagtgatttttttttcaggtatgtcattaaatgaaggatttgattagacaatggtgattttcaatagattcacaatatctacaatttttaaggctatgagtaaaaaatttcaaatgtatttttaactgaagtcgtactaagatattttattttaacatttaatatatttaatagagatcaaaagtttgtcaactcaatttgagaggaatttactaaaagaccggaaattattatgggtattttaaaatcatacagtccttaaattcatagacaagtgaagtgtttgaatgaaacaattgtagaatataatatagctcatgttctgaataaacttaagtaggaagaatacttatcagtgatagtatttttacattatactatacacccaattttataaagtgtatctcctaatgcagctttaagagggtatagaaaaagaattgttgatttgtataattgtaaattaggaaatccaaaatatctgactctaaagggtaatacaggaaagcaaaatgtatttaaggttatgatatcatattagcaagatgtggaaactatgtatctgacgtttaaataattaataaccgaagtataaaaccgatagtcgttacactatattaagagaaaaagaaatctagatttatttaaattcagaggtagagtgctaattcatgaggatacttatctaaaaaatagtattggttgtaaatttgactatatgtaatttgaattatttaaagtggagaaaatgagaggaaatcaaaatattaacagtaaaagagatgccaaatatatgagtcatcattaatagtacactaaaatatgagtgttaattatatatataaatactcacaaattatataatagttgcatataagttaataaatagattatttctatgttcctcaaaacataatgtactactgacctaatgttaagctgctgaaatgatatattatctgtttaggaagtcaataaatatatcaaggaagaaaaatatttgtcatgcatattcaatactacggagataagatcaaacaaaattaacataaatcaatacattataaaaaattaccaaaaggttggcatatatacgtagacgactttacttattaatttttcaatctggatgaataatatatatacattacacagtatttttttttatatttatattattattaattcctaagtaagaaattaagggaaatttactctacatattaacataaataataatacaaaataacaatatataaatgatcattgatgctaaaaacatgtatactgatattattcatccagaggaaaattagtaaagagcattgtagatcaaagagaaggttgcggccatgaacaagaactaaatagaaaagcaagtttcagaacaggaaaatagataattagtagaaaaatgatgttaatattgtgggtaatataaagaaaatatcagaaaataataaaaaaatgggaatataagagagtgtagaaatatctataaaaagatatttttgttgtagtccaaatagagcttaaagtaaaagttgatcaggattcgtgaattttatatgataaaaaaacatcagtatagcggtttcataattgcgtatttgagttcgaaccagttattactagagtactactcaaataaaaatggtacttactatattagtaagaagtattatcattatgactaggtaagaattcacctggacaagcagtattttttgtttatatgactgaagaagagacactggttatttgggctggtaacatatcgttgaatatgtggtaatgtgttttattaaaattcaaagcaagtaaaatatcaaaatctagataataatgtttttattgacaacacttcttgtgtatatacaaaataaacaaagtaaacagaagcgactttgtaatataatatgtttgtatttaatattatgcatatatgttgaataacatatttccaagtataaattagaagacggttgtaaatattagggatatctaaaagatgcggataaatagagagggtggtaaccaatattcaagaaaataaaatgattatggattgttatttttatttttagaatgtaaaatattgaactatagatgggacaaaaagataggggttgtcaacttgtaacattgagagttaataaaactgatagtcgaattaggtaagattttgattaatgtaaatatgggtgttagggaataacatatcagcatatatgtgttgacattacttgttgatgcaaggcttttgaattaaaaattctagtagagttcatttaagattaatgtaatatgatattataacttacaattaggatattggcgatattataagctttttggttatttataataagaagttagtggtactataaattgttattgtattgcttaatcttccttttttttttctttttctttttttgcataactaatatacaagatacaatattaacagtatattcattttatcttcaggtcttctttaatataaattttcataacttttaatcacttggtaaatgataattataatatatagaagtgaatttaaattatcaaatataactctaatcatatttcaataaaaataatataaataatattggtttatctgtgtaatgactgatattatgaaaactattgtatacaaatctgtttatttaaacattttcttttggtgaattttaaaaaatttcactggttttcaaattctatataccttttcaagggcatatttttttgttgcaagtattatattttctgcttgaagcaataattccataataaaaatttttctattgcaaaaagtctgattttcttttgaatgataattaaataatccaatatacaactttgtagtatcaattcgttactgctgatacaagtttctaataagaaacaaataatatagtcccatcatatcctaactaaaagaacgtttctacattgaatgattccatggagaagatatgggaagagattgaatagtttagttaaaaaaacaatatggatagtatcagatgcatcttatataaattaccaatctagttcaggggaattaaaaaaatctacttaacacaaaaataaaaaaaaacaatatatgacttcttcaaaaaataacaagaaaaaaaaacatctgttcttttaacaacttttagtagtataatttttccgaacagaactaaaatagcgcattcacattttcctgaattggctaatgtaaactaaagaggaaatattgaatcctttaggaagtaataccgtaccacggggtcttttgttttatcaattgcttttttttctcttgaaaaaaaaaaatatctttaatatattttcaaattttgaaaaattacaacttttaagttagaagtcttttgctatttaattaacatgctttgtattttacattctgataatattttaaataatattaagacaaaaagtaaaagcaatatttatcttttcgtacgattaggaatagtgattttatttttcgcatactgtgttaattatgttcacctattctttaccagtataacgtatcatacttccacgaatttattaaactattgtttgttatatcttttgatatagctcttcttatcctcaaaaatatctaaacgaacaattctgaaaaatctttttacgaatggaacaattgaaagaagaaaaaaaccaaaaaaaaaaacaataggaaaataatagaacttagtcataattcacgcctccactttacttcttcataaatataaagttggtgcatttaatgttccgagaaaattaaaaaacagtcaacaattaaattttttttctcgattcgaaagaaaaatttttaatacaataaccgttacacacaataagattcaaaggaataaattcttgtttcatatttccatgctagatatcggagtgatctgaaaaaatccacttttctattcttttaatttttgtcaaaaaaatctcacaatgttttttgtaaaacctattttattctccttgagaaacaaacatttctcgacaatttaacttgagaaaattaacagccttataaaaaacgaaaacaataggagatgcagatcttttataccatcaaaagaccaccctgacatcgtcaaaatgtactatatatattttcccacagaataatagatattactaattgttctagtttccttttctatagtatcatcaatgtttatttgtcgtaaaaacctacgaaacttacaatatataactgtgtgtctatatttgcatttatactgtatataaactactctttatatctttttcctcttattcttcgatagacagtgtagaagcttttttcatcactcttacttccacgtgttaccccccccccctctttccccaaaaaatttacaaacagaaattaacaaaaaatcgatacggtcaaacaagaaaaaaaaaaacaacgcaaaataaaaccattattcatttgttattgttaaaatgcagacattaattttgtggtcactattgggattgcttgtgaccaaagtcagtgctgctactaccactatttcaacaccaacaaccttgtctggtgatcaaacgttttctgatgatatcgtaattgaatcaggtgctactcttgcattagtatctggttcttcatattctttcaatggcaatattgacgttaaaggttctttagatattatcggtgattcaacaaacgggttaactagtctacaatttggttctactacaacaattacaaacagtggtaatatcaacatcgaaaatattaaatcagcaggttctgctagtgattttgttattgcacctgcaagtataaataactctggtacatttactgtctcacaattaaatgctgctgctactgtgccaggtactaattttactatagctccaactggttcctttattaacacaggtactattgattttgacacagctggtaaaggtggtaccacaaatgggttcctttaccttggtaccatgacaaataatggcgtcatcaaatctggtgggttttcggacttgatatctgacccattcttttttactcgtagtagatacaagatgaaaggtattgtcttcaataatcctatagaaggtgaaggtgaagtcaccggtactaagggagctgtaattgttcttaacaagagtgatattggagagcaaactttcagtgttcatgagggtatgtatattctaaatccaaaagttgtaccaagttcgtttaaagttgtgaattttattggatcagagtttgttttcttaggtgtaaagtatgaagaatggaggactgagaattttggcacgattaatggtccacactttaatgttggaatagatggtcaccattactggttcaacacaacctgtccagtcagggaaaccgactgttttgaaactgatattgatgttacgccatataaagcgccttatcgattttatggtgcaattttacacataaacaatataatagaacagaaatgtccattttctgatccaattacaaagacaacagttactactatgaattctgttagtgaacctacaactttttcaaccataacaacatccatagttaatgagtataaatataccgtacctgaaattatctattatgttgctgtacctccattatctaccacctatacaaccataactacgttgatctccaatcctatcacatcaacatacaccacaaccattaataatacagttgggtttaccactcaagaagttgttgttgttgtgatcaccccatcaccatcgacctcctacactactactactgcagatatttctgccccaacaacatctacttacactactacagttgttgatagcaatggttcttcctctccagaagctgttgtggtggtgattactccatctccatctaccacctacactactactactgcagatatttctgctccaactacaaccacctacacaaccactgtcactgatagcaacggctcttcatctccagaggttgttgttgtagttattacttctgctccatctaccacctacaccactaccacaggtccagtttctgccccaaccacatctaccttcaccaccactgttactgatagcaatggctcttcctctccagaggttgttgttgttgtgatcactccagctccatctaccttctatacgaccactactggggatgtctctgccttgaccacatctaccttcaccaccactattactaacagcaatggctcttcctctccagaggttgttgttgttgtgatcactccagctccatctaccttctatacgaccactactggggatgtctctgccttgaccacatctaccttcaccaccactattactaacagcaatggctcttcctctccagaggttgttgttgttgtaatcaccccatctccaagtggcccaactatctacaccactactactgcggatgtttctgctccaactacaaccacctacacaaccactgttactgatagcaatggctcttcctctccagaggttgttgttgttgtgatcactccagctccatctaccttctatacgaccactactggggatgtctctgccttgaccacatctaccttcaccaccactattactaacagcaatggctcttcctctccagaggttgttgttgttgtaatcaccccatctccaagtggcccaactatctacaccactactactgcggatgtttctgctccaactacaaccacctacacaaccactgttactgatagcaatggctcttcctctccagaggttgttgttgttgtgatcaccccatctccaagtggcccaactatctacaccactactactgcggatgtttctgctccaactacaaccacctacacaaccactgttactgatagcaatggctcttcctctccagaggttgttgttgttgtgatcactccagctccatctaccttctatacgaccactactggggatgtctctgccttgaccacatctaccttcaccaccactattactaacagcaatggctcttcctctccagaggttgttgttgttgtgatcactccagctccatctaccttatccactactaccactggtgcagtcactgtcccaatcacatctacctacacaactgtagtcactgacagtaatggctcttcctctactgaagttgttgttgttataatcacaccatctccatttagtagctttatgacatcaccaatttctgtaccatctcctctctatggaaactccactatatctggtgaaaagattgaatctactttgagtggcactctagttgttctgactacggttgttaatggagttactatgactacaacttattgtccagaaccatctgcaacttctgaaacaagtatgactgctatcattggacatagttctattgaatctgtttattcaaagaaccaacaagaagagactaactcatttactactgctacaaatgtgactccagttatttctgttacttctaccacccctggtccagcatttaccaatggtaaaaatcacccaacatctagaaactctagaacatctaccactgtaatcggtaataatgagtctagaagatcagaaacatcgatgcctttaatggtgccacaagtttcccaatatgtttctgaacagccatcctcatcatcaattgctatcacagtacctcatgaaggtgtaccttctcttgtatcatatgaaggtaaaggtagcaccatgtatatgatgaagtggagtgttgcccattgcattggtttattattattcatggtaatttaaattgattaaaggcaaaaaattttaaaataaagaattctaaataatttaataattaaatatttctatataagtatatagtattctaatattttttatattgtgtatttttattatttatttgattttcaaatatcttatacagcacaaatagatttactcattcctaataaaccgataatatcttctcccaattttaagtaatttaaattattcaatacaattatacaatctaatagttgctatatagacattttaatacatgtatgtttttgctacatgttttggcaatttttaataaagagattgtgattaggaaatttacttctgtataaatcgattgatcatggtttaaaggatgtaaggtctttaaatcttttctaattaagaaaaattgtaattgtgaagatttgatgctagtttaattcaaagatcataataaaaggtttgacacatgtcttaaaaacagttacaatctttctttacctgtatttactgaaaagttaactagacaaatgtatttattcccacattccttaattattttctttctgtcctctgtatatacaaatacatccatagggaacacataatacatacatatatacatggatatactttaattaaataccactatatattgctaggtcaaataactatatatatatatttgtgttaatatggtcactgttattaactcgcttaaacttatggctatacttctatttctttttttttttgtaatatagtattcaattgtacgtaagccaacatattcaataactattatattcacatgaacagtagagacatgctatagaattactctaacaatatttaaagaaatggaaacttcttttaagtagcaaagggaaaaaaagagaaataagacactatttcccaaatgtacagaattgcacactgatgacatattatacttactatatatgttaagaatattatacacaaaaatgtagatacacagcatacggtaacagttgtactttattgatccattactgtatcatatctcttcctgtattttactgaatgtagagatttcaaaatttcaaaagagacaagagaatttctctcccacacttgaaaaatatcgtgataataattatcctaagatttcaataatataggaattttctttttaaatatggaacatgtaacaatgttataacacattcatatttttgcaaatgttgatccataattatagtatgtcttgttattttaatgttataatggaattaaactcctattttttttttttgaatttcaatatcttctcatgactcttggttacaattagagatccatacacagtattaaacatccagctataataatgtcagattaactcttaaagagaataaatttcctgaatagtaaattgatagattaacatgttaatactccaccatagtatattcttaaatgttgttcaatgttcaaagatcgagataaaatttctttttattacgttatttttcaaacattaaaataagatcatttgagcaaaagatagaacaaaattgttgagcagggaaagcagtacagtaaaatgaaataaaaatataatcaaaatattattcattatattaaatcaatgtgtcttttatcatcattaccataagcattgaaaatcaaacataaatcaaatacatccataataagattggaattagtaaggataaatatcctgtaagatataagtaaaaagatgatatagtaaatttgtttattgatatagtataattatatctatgtttataacagttatcatgatctgttaatttcaaaagagtattgcatatgatcataaattattataacagtatcattcgatggataatgaagtgatatagaagatataattatatttttcatattgaaaatattagtaagggatggtgttcatgtgttattggagtatactttaatagttatattcataataaaagtggtagtgacacaaaaaatggtcatagtttgtcaataaatatcttccatagtcacagtctatgcatggagtaagtcattatgaggttatttctgatagtcaaatataaatgattattaggtatacagtggtgtaactatgccatgttaaataactgtttgataatattcaatattatatcatatgaatatgtaaagaaggtagataataactggctatttataagtaaagttggttacttatatgcttggttgtcgatgagagtggctattattgtaattgatttttttttcgaactattttttcagattttgaaaaaaggaagattgacaattgaaatttgaatgaaatgagattggtgggtaattaaaagaaaatgatggctgatgctaagagtaattaagtgtgatatgtttgtacagtatcgttcttgtctaagacataatatcaagagaagttgtatattaatgaggagttcatagtttaagagtgataccatacaatctaccagttattaatgtctaaatgaagtaagcagtttaagaataaaaacataattgaaagtaatagtggttgatatgaacttagtctactatgtataaatccatagtaaagatacatgttaatatcatgatagcagatactgtgaataacattgaatgttatagatttaaaagagcaataaaatttcctagatgatattaccataataaacctagaaatgtaagtgtaaatataagatgcgacagagtgaccattaatggatcacactaatccagtgtattatgtttatgttgtttacattgtttctatatcttacatatgaaaagaaaatggtctaaatttattgatctatttatcataaaacaaatgactctatcgttgttattacattcttggtttttagtatggctaagtgtgtatttgacataggttacagtttatctattacacattcatattggaaaatatgtatttataactaaataacaatgtgattttaagaattataacctgattattgcattactttgcaactcagctactgttaataagcttaagtgtttgaactgttgcaacatatacaattttcatattatttccttacgtttaataggtagaaagtacttaatgatataatttgtgatagtattatcagttaataaagaaaacggtacaaggtaaaatccaaagaaataatgaatatatcttatatttctagtaatttgtataatttattaagttacacattatattctcttctctctatcatacatttaatattttgaagtgctatgtgcattaatacatctacttctactgatatcctagtaatagctcttattaaattacactacccactacaactatcactttgcacaatactatcttttattgtgtattatgccataccatagcaaacaatatagaatagccacttattcattcttacatgacttttttgatctatacctactggttggttaaaacagcactgtttgtagaactgtaactgccaacatatgctaaaattgtcttcttatcttttcattctttttctttcctgaaatccaatttttcttaaattccaaaaacttttttcaatcaaataaaaacaactcaaacagatatcaatcactacaccatgcaaacactgatgtaaacaatacaaaggagacctgcttacagacaagaacacatcctcagttgagatctatgcatttcacaaattcacattatataacattgagatactaccattcaacatgatataattatgccataaatatatttgatacagccaaccaagatatccttaactatagagagtatattcacgacaatccactttgtacatgggttattactaaggaagatatttataaacaaaatacatctatctttatggtatggttgctctattgctatgagtatttacaaatacataaacacaaacacttacagtatcttccacctaaatgatataatctgataacatatcaatttcacatagtgatcacttcaatactactaccatgaaacctatccatatagatgaacctcacagtataattatcaacactatgccaactaccatcgtactactacccaactatatcacaaatattatatccaaatcactcacaaaaatacaccctaccaataaccaagattatatttcttcctgaaaatcaattcattattactgactgtcaagtggtaaaattccataacactgttgtcaattctcacaacaccaatataatatctaacaatgaacaatattaaatcaaataatacacatatatgaacatgtaattatactgtaattaaaaacaaaaatggtttaagtgcgagatacacaacagaaagtaggttttttgctgatctgtgggaattattttatctgagttaccatatttatatacaattgagaaaagtggaatagtatttggagacatattaaatttttatgaaggtttataataataccagtagatgccattcctgttggaaattaaacaactgttaccacatgatttattaacaatcaagttattttatttgtacatcagcatgtattgaaatgattaaaaggtgaaatgttctttgattaattaaaatttactgaatttgaaaaagataaagaatgagaaagagttaggggtatagtatatggagacctgtttgaattggtgtattacataagccagaaatgtttaacttgttagatagtaagatgttatttaagatagttgcaatgatcattattgatatgttacctgatgatcaaacaaacatattaatatataaatttctattaagagtataaaagcattctaaataatgatagctttcttggttggaatatgaataattaataatattaataacaccaaaaatatattcagtaagcaatagtagcgggtttaattattgttcatatagattgttatctttgtctatctcattgtcatagtgttgtattagtattgggataatcaaagagatcattttaatataatgaattgtagtatcacaaataattctgttaaattaatacaattaataatctactagtgtgatatttataatgtagaatattattatagatacattattggaagagttgttagatcatttataacagattagatagtttgaaacatgttagttatgttcttgttctaatacttatattcatattggtaatattacagttaagatccaagatagcacacagtttagagtaaatagcaaattagcctcagcataataattaatgagttattatacatattcagagtttatttatattatttattatacaaaatgtttaaggttgtaatttatttcgagatttatgttgctatgtctaacaaagagtaacaaaattatcagatgattgggatatgagtagagtaaataatgtccattaacattgctacaataaaaattaatacatccatgtaagttataaaaatttatattaaagaagattcgaagataaaaggagtatactgtataatattgtatcttgtatattagttatgtagaaagaaaaaaccaagcaatacaataacaatttatagtaccactaatttcttactataaatatcaataaaacttataataccaccaatatcctattgtaagttacattttcctattattttagtctaaaatgaactctactagaatttttgattccgaagccttacgtcaacatctatgaagcaatattaatatatagttggcggctgctttgtacaatttttataagaatctatcatctcttaatatttatatgtcgttctatatttgattttttcttttccttcctttttttgtttgttttttgcatatataatatttaagtatagttattaatttcattcttatacaaactttttgaaaatcattaaaaaagtccagacaaaaatttgtaaggattcttataaataatatacaaaaatatagatattaattatatctataaacgtttacaaatcacataatggtcaattctaaactagcaaattcattatttttggctgatcttgaatacctaaactgatcttaagttattttattttctgggtaaagcttagaagatagaataccaaccttaaaactaataattacctctggcacattctctcaacaatcagagatttcttaaataaaattttcagtaatctgccaccaacgttaatttgacgatcatttgttcgaatacacttacgacttggcttcaaagttttggctactccaagtctttccccttaatatagggtgttacctgtagactgcgcatttcagtattccaaatagagcttcttacgaaatttaatacaactaaccattgtgaagaactcaaattaagaaatcaaaaattaagatagtgaaaaattctagcattagcatctgcacttaagatgctactaaaaatcataatcatgattaattagtataacccttcatacataaattgcaagtatatttttttaccttcttatataatagaaaaaaactgagagtatcatgaacaatatttataagaaataactatttacaatctataaaaggaatttgtgaaattattactttgttttcttatcttgatcctaatataaaattccatcttcgagacaaacaatctttctcatctatatatatatatatttactagcctatattataacaataccaacagtttgatttttagtaatacctatcacattatcttgaatcatcttctaaaatactagttaagatttactcaataatttttctaccctaaaaattaaagagtataacgaccatcatacgctcaccaggttaaaattggtaaaaaaactcaaaaaaacgataataagaatagaatgcacgaaacagttgatacgtttcttaaaaaaaatacagtattctataaatatcatttattttatttttcttcaatagttagacttaagattaagacaacttttcacaatacactatttaaatctttaatttagactggtgcttataattttagtaatgtcagaccagatttgcttctatgtcacaagatcgattaaaatatgacactacctacaccatcacccttgttaacggtgacagttcttcgtcttcagaagttgttgatattgtcaccccatcttcatccaccttatacactactgcttacaaccatctaaagggtaaaaatactacagtctaacaaaaatattatattttcttttgtttttctatacaactgtccaataaaaataaaacaaaatccacttgtttatattagttttaaccaatatatagttcagagtacttctcttttaaaatcattttaaagatacactcaaaagaatacttcacatagtatactataaacatctactacctacaaattcttatattttaacacatattattttttaatcataatacttctcatttctattttatactttccataaaatgtactggaaaccctctataaaagtgtctatcctacacactgaagtatcgaaagactggatgagttttttctgtaatgttaactctaccatctagccttaaacaggattgttacacgctacaacaaggaggaagacttacgtacctagtctatcttcctccattaggactccttttaacagttcttcttttttcaaatatttgcaactttgaataacaatgcgatctcgaggaaattctatccactgaattcggaaaaacaaaacaaaatctaagctttttttaatggacatttccctttttgggataaagccgtagtgtttttgtcataataatttttactctattgtcaacggctttcgagctaaatctcacgaaaaatatctgcagtcagagaaaaaaaatttttcgacttgtaaaagaaagcaaaatctttaatgggacatgtaaaatccttaaattacacaactactggaatcctgttgtaggtagccatttttcttttgaagagacagagattagtcctttcaatcttgaatttcacatgggttagataataaaacaccaaataaacataaataaatatctcagaaaacttcctaattaattacttttgttaagacccctgctagccaaatctgttttaatgatagagtgttttctattattatatttttgaaacagacatccaacaattactacaaaacactttgttttccgaggatacctgtcttcgattttctttcatatagatcaaaacaggttatgtgggactgttgtaataatagtagtcatgcttctacttttcaataaatcattctaaaatcttctggatttgtcaaaatccttagaaaacacaatcattataaataatataaagaaactcaatcaaacatacaacaaatatgtcaaatataccttttttatagcaatgctaattatgaaataacaaaacaatttatcataacaataatatttctgaagaatacatctgtgtaaatatagacgattttatttttttagattttcaaatattatcattaattatattaatatgatattgtcttcaaatagtcagtgatacacttaggcattatatgcaataaaaaacacaacaaaacttttttcaagataaattttatactaatggggcgatattatcaataaagtagcagagatttctaatattacacatgaataatcattcaaatacagaataaacacaagttacagcgagtagtcttcactgctaaattaacacttggacaaaagagtggttttaacaataaatttgaaagataaaatctcttttgagccatatattgaagatgatagcttactaaattttacaattgtaacataaaactacaaatattttatggtaatttggatactacaatatgaaaatttgttattaaaaataagcaattaaacgaaaggaacaacatttttagtttgaattttgaaaattaccaaatttaaggaatattgatgtcctatatctctgttaagtgtaaattaaccttagtatacttggcaattaaaacttgaaaaggactctaataaataaatatccttagtcgctagtaattattaaaacatctctattatacgtaaaagcaccaaattcaattcaagatatagctaacttacatttatctgagtattattcagttttgtgatttgttataaatctattaaatctttttagtattcctaaaataataatagcaatatacacttgaattgttttaattttctttttgcctctaaaagaataaatatactcaccgatattaacgtcgttactatgtctctccaagatactgtaccgtaattaatttttgcttttcactatgtttctaaaacaatacttctaacacctcctcaaatttataaagcatgaaaattttgatggtttcgtagttatgtaaacattttcttattatcattagaattagagcttttgctcttcaatgaattaaaatatgttcttaggacagtatgctttataacataatataaaagatgtttacttatatctgttagaagtgttttttgtttttttaaagatctctagatatctgatattcaactgtaataatataaaagaatctcataaatgactgtatcaattttccctattaattgaatactaattagaaatatgcttgggataaatcaatttgaacttacaatttcatttctatgaacttcattttttttatataatacaggatacgacaatctcttgttatactaaattcttatgggtcaaaagattttgtatatatcataatgagtatgttttggacattatttctgttaactataataaatatttatacaataatgaatcaactacttcttataggttgcggattgcatacattccaaactagaagaaatgattcacttcctaatactacataaaaacattgacgcaataacatcaacatctaatacgattaaaaaaatgaatgtccaaatttttctgatcaaaaacaacagaaaaaaaaactgtttttcttgcgctgaagtaatgaaaaaatgcatttctttcgaagtgaaaataaaacatttaacataaacaactttatctactatggattgtcttaaaaaactttagcttacgtattgactggctattcttctcaacaacaccatattagttttcaaagaaattacaaacttggtatccactagaattttccaatccatttgaaacaaaaacaataaatacgatgaattattgaaacaataattatagcatattcccccttgatgtcaaatcacaattaaaattcataattaaaacgtttatagtattataattacctctgcttatttggaaacatctattagcccattttacgatgaaaacaagtagaaaatttcatgtgagtgagatatttctattttactattatgtgatcatttaaaggaaaatttctcaatgtttgttccaaacaacaacaggcaaaatgtcatgcacaaaagtagtgtaaaacaacatatttgtgccagttgcataaatgtcaaaaaggaaattgcaagatttgaaaacaaaactattatttacaatgaaattatgcaatcttaaattcgactacgttattatagttaaaaatgccaaataagcgaatgcaaataatttctaggctttagcatctattgcaactgaaatattttgataaatgataaagattggcagtgttgtattgatgctaactttagcaagttaaacttaaatcaggttccatagagacaataacttatgtggagttatattttaacacatatgatagaattgatgattagcacagtagtattgaagatagttggtttatcttagacaataatgaattttatatctaacatttctattacttgagccttagacaaattggatctccattttattaaaaactatgcagaaaatatatatggtgtttataaacaaacacacattgatccttcactatttctttttcttgaaatattttcttcaaaaagttgttttaatgatctacaaaaatcacttttaaataaaaaagtagtgattatctgcctattattcaacagttttgataagtatactaataattaaataaaaagaaaataaggcaaaagctagtggatattattttacaaataaaataacagagagacttttcttacctatggttataatattatatatatctagaatctttattgctatatcataataaatagaattctaaaatttattagttcaccattaaataaatatgaaatccaacctttattaatgcgtttaaataatttatatattacaacatccaaaatttttcacataatactattaatacttacaaatgaataatatttaatgacatagttattggaaaagataatacaaagtgaaatattaaaaactaatgggtgtatattatatttctattattttgtatattttattaagtcttaggatataattagatgtaaacatttcaagtatatataatgacagtttgatattatttatttcacacaatacatcataactaaaagttggattcttataatacgtagttagatttacaataagctgttaataatcagtggtgtgtatttgttacttgctatattggcaatcttacttaaaatatacactaccattagattaataattaattatactcccaggaagtacattcctataatatttagtaactttggtggtttcctcattagaaatgtcttcaccaagacgctggatagattatcaccaagtggaataatttttggtttatttgtttgaacgttattgaggtctacctgctcaggtagtttcacaagatcgacagtctctgggtctttcgatattccttttactttactcccattcagcttagttctcttagatatagggttcccattcagtatttgattcaaagatacagatcttttcatttttacatctattggagtagtttgattgttttatattgtctctttagagtatcaaatatgatcattgatatatttcagtaggatcttcagatatttggtctctacgatagcattgaaggattccatatagatagtgacgtattcttcacaactgaaatgaaaaaaatatcgtccttgagacgcataaagttgtatttaagaaggtcaataacttatacaacccctgtagtcatgctttttaggtaaagaaaggaaagcgtcatggtgatgagaatgaagtagactactaaggtcatgctcgtagtagtaggacaagattcaatatttttaggtaaaaataaattagaccaactaaaagtgttctgtaaataaattatatttaaaaaaaatattttatacaaaaagtaaataaataaaaccgaggttagtataaaaaaaagaggcatttgtacttgtactaataatcaacaggtgctgtaatttttttatactaacatcagacaatcacaataaatgatatattacagcgtctgtcaattattagtacaggttcaaatgcctctctaaaacagtatcataattagatcaaatgaataagagccattaaaatagcgctgaatagaacatctgaggtcaaactagctgccaaaccttcatattttgcaactgtaacactttccgcagaattagaagaagaagtagcaacacctacagatggaacaacattggaatgggcagattccatgcttacgtctgaaggtgcagtagcagtagcagcagaagctgtaacagaacctgtcttagcactttctggacatgaaggagtgtatgtagtgataacaacaccgtctgtagtataaactgtactaactctcaacactggttcaccatgtaggacagtttgactgttttgggaagaaaatgaagtggtagcggtggatagtgagcaaactggacattcagtgacatctaccatgtgtgtgctcttaacagtagcggttgtgacggagtgagcaacatttgttttagcggatgcagcttcaccagtagcatgtgcattaccattgacactaatagcagaaccattactgttgcttggggtagatgttgttgcagtagtagctgatctgtcagtggcatccatagcagaactatgactgattgaggtagatttggtagaagtagtagctgatctgttagtagcatcgatagtagaaccatgactgttactcgaggtagatttgttagaagtggaggttgacttgccagtagtatttatagaagaaccattactgttgcttgaagtagagatcttagaagtggcagttgatctgtcagtagcatcaatagcagaaccattactgttgcttggggtagatgttgttgcagtagtagctgatctgtcagtggcatccatagtagaaccacgactaattgaggtagatttgtcagaagtagcagtggatctgtcagtagtattcatagtagaactatgactgattgaggtagatttcttagaagtagtggttgatctgttagtagcatcaatagcagaattatgactgattgagacagatttcttagaagtagtggtagatctattagtagcattgatattagaaccattacttttgcttgaagtagatttgttagaagtggaggttgatctgtcagtagcatcaatggcagaattatgactgttgcttgaggtagattttttagaagtgatggttgatctgtcagtagtattcatagtagaactatgactgattgaggtagaagtgatggttgatctgtcagtaacatccatagcagaaccattactgttacttaaagtagattttttagaagtgatggttgatctgtcagtagtattcatagtagaactatgactgattgaggtagaagtgatggttgatctgtcagtaacatccatagcagaaccattactgttacttaaagtagattttttagaagtgatggttgatctgtcagtagtattcatagtagaactatgactgattgaggtagaagtgatggttgatctgtcagtaacatccatagcagaaccattactgttacttaaagtagatttcttggaagtgatggttgatctgtcagtggtattcatagcagaactatgactgattgaggtagatttgttagaagtggtggttgatctgtcagtagtattcatagtagaactatgactgtttgaggtagattttttagaagtgacagttgatttgtcagtagcattgatactagaactacgactgttgcttgaggtagatgttgttgcagtggcaattgacttgtcagtagcatccatagtagaactatgactgtttgaggcagatttcttagaagtggcagttgacttgttggtggcattgataccagaaccatgactgttgcttgaggtagatttcttagaagtggtgattgatctgtcagtagtattcatagtagaaccattactcttgctcaaggtagatttattagaggtgatggttgatctgtcagtggcatccatagcagaaccatgactgttgcttgagatagatttctcagaagtgatggttgatctgctagtagcatcaacagcagaaccattactgttgcttggggtagttgttgttgcagtgatggttaatctgttaatagcatccatagtagaactacgattgttgcttgaagtagatttcttagaagtgatggttgatctgtgagtagcatccatagtagaaccattactgtttgaagtagatattgttgcagtggtagttgatctgtcagtagtatttataatagaactatgactgttgcttgaagtagatattgttgcagtgatggttgatctgtgagtagcatccatagtagaactatgactgtttgaggtagatttgttagaagtggtggtcgatctgtcagtagcatcaatagcagaatcatgactgattgaggtagattttttagaagtagtggttgatctgttagtagtattcatagcagaagcatgaatgttgctcgagttagatttgttagaagtggtggtagatttattagtagcatcaatagcagaaccacgactgattggagtagatgttgttgcagtggtggttgatctgtcagtagcatcaacgacagaactatgattgttgcttgaggtagatttgttagaggtgatggttgacttaccagtagcatccatagcagaattatgactgttgcttgaggtagattttttagaagtgacagttgatctgtcagtagtattcataatagaaccatgactattgctagaggtagacttctcagaaatggttgatttgtcagtagcatccatagcagaactatgactgattgaagtagattttttagaagtgacagttgatttgtcagtagcattgatactagaactacgactgttgcttgaggtagatgttgttgcagtggcaattgacttgtcagtagcatccatagcagaactatgactgattgaagtagattttttagaaatgatagttgatctgtgagtagcatcaatagcagaaccatgagtgttggttgaagtagttgttgttgcagtggaggttgatctgttagtagtattcacagcagaagcatgactgttgctcgaggtagatgttgttgcagtggtagttggactgtcagtggcacttaaataagtaaactgggccgttgatggaaagaagtctgaccaatctccaaaaggtattgtgtaaacagggttaggatttgatgtcggagttatagtaatttgagctacagcatgtgttttttcatatagagatatagatgtccaatttacgggggcggctgtccagtgaggtgttgggaactgaagagttgcataagctggtttcagaggcatgacattttcatggtatttaccataatcattaccaagaggtatgaactcacactcaaaaaaatatcgaccaggcaaaccatcaacaccgggccaatattcttgcgcaccacaaccaacctccgtggtggatttccaaacaagctgtgtaaaatgtccattatgtaagtaaggcaaaaggtaaggatcgctgtaattataatcattaatttcatcaaaccaggcgtctacaccgctggtcagaggaccaggtcccacgtaaaagtttgaaccaataaagtagccgtaatcgggagcgtcttgaaaaacaggcgtcttgacattaaattcgcaagcccaccacgcagcccgttgggctaaagtatcagaccaggtcaaattaggagtgtcgacaaacatagatctgtacttattcattaggtccaaaacagccgccttttgttctggagtcaacatacaacgagcatccttagatgcattatacggattattcacaggccatccgtccactgtggcaataggacccttaccaccgtgagtagtcggtccaagataactagtaatataagatacttgcggttgcgaataactaggaattgtttcagtataaatagaaatgtaataagatgtttgtgccttcgatacagcagaaaaagcagctaaaagcagtgccgcgcacaatgataaggcacttgagaccattatattattttcaaatattcggaattattgacttttcagtaaaatatatagtttggtgagtatactttatggcgttagttttttggttatttgaggtgattcacttagttcggttatactggtagcatctgggagtataacgagatgatgctcatgcctgcaagaagagaagcaagaaacgaaagaatattcagacataatccatagtagttttatataaaaatgtgctcatgacttgcaataaaaatgattgtctaataggttctaaatttttgactgaaccagaataaaatataaataaagttttgcaataaatcttcaatgataaaagtgtgtaaaggagtagaaacaaagaatgaagaaaaagatctgtaatcttcaacaattggactaaaaatctaagtaaagcacaaaaacacagcatagctgatcattttattatctctaataggaaaaatatcactgtgtggtagtttctttaaacaaaaaaggaaacagaaaatgttgagttctcgaaaacatttccaaatggagaattaaaaatattgtttattgtttgggcattttcacattgcagaacaatagaatcagttttgtctagatactttacttttgaagaacataaaagggaaagtttacaaatttaagaatggacaaatagttttttttcctttttgctattgtgttggaaacactcgtctttgtatttgatgcaacgacaaaaagaataaaagtgaagaaaaaaattacacaagtgggaaaagagataatacagacaattctaaccacactatagatatacatgtctctttgtattctatttttaaatttttgcccctgaattattttagagaatccccactcttacaggatcatcgcccctgattaattagttatttggcatttatatctcttttttgtatatatcacaatattctatagtaaatcgatctatagaatgttcaaaatttattacttcattcacaatagaatattaaaatttttggcagtgactgtgggatcgaataggaatgtataatttaaaaaaggggtaaagaatttttattgcattgttactgtttgtacataagttatataaagttatacactataagaaccatcaacaattttttttctttttttagttcgtattgcaagaatcagcaccttatatgacgttagcatgtagtaatattttttataatattcaacaaatgtagtaaaattgttcttttgttaaccaagaatttattatttaaagttattattgttctattagaacatctattatgataaagatctaaaatataattattctcctggtagatttggatctcaattagactttttagtgtgatattcctattcctgattttttctcttttttccgatctagtataagaacaatataatttgtaaaattcaaaattctccatttaggcggagtattttttctccttttcggatacacaatatgtaagacatgcaagagtactattgaactagaaaaaatgacgtataccttgtggaatccttaaaatcttttacaatgtcgtttaatgatagctatttggtttaattttaagacaaacaagaaaaaaagatgattattattatattcgacctattgttatgatgttgtttatttatactaggtcaaaggatgataggaagtttgtatcttttcaaaatagcaagacttgataacagagcttttctttttgttttttgtttgccaattggtggttgaatgaaatgactataatagatagtatacaatgaactatttttaagcatgttttttttttagattatgggatttattgttgtccaaagcatcttcttgtagtagtatttaggaatatttctgttagtaactgaagtgaggtatttttattcctaagtttcgtgatatgtctaaaaatgacaatttaaaaacaaccctaaagttctatggcttttgtaaagaattgacttacaatttaaaaaataaaaccaaacacaagtccttgggacaaaaaataacaacaatcactctaggatgattgctaactgaaaaaaagaaataaactttgttggttattttgcttgtggaattgtacattccaacaaataaatgctatagattaggtaaatactgaagaataaccttcttaaagaagatagtaacttgttttttctacttacttactatattcatattaaaacaggaaaatataattaattcatcttgatatgggttcaagcagaaaattagtttctttgtcgagttgcaaaactatattcaatccctcgtttgatagaagaagagttgaacaatcaaacttgttgtgattttttaccctaaaaaagttaaacaatcagataaaaaattgtccaaatgtagacaaaatttaactggttagaaattagtattaagtatttttacttttgccaaaagttttctttgcttttgttactacagaataattgaaaagtgaaatgaggttgctgtggtaattggtctgaatgtgtgtttacatgacaagaggatgtttttctgttttactggaacgaacaatagattttcaaacaacaaaaaaatctttcatgaaaaaaaagaataatttgagttagctaaatataaacaataatagatgagaaaaattttcaaagaaatttcaattttttctaatactcccaatttttttattttgatatagcacaactaatttgaattcacattacaagtatagatgttacttctttggaaatataaaaattcttcattctgtttttcagaaaattacaataattccaagttgtattttggttagtgaaaattcgccatgcagatagtgttgattagtaagaattgctattgcatcatcataatatttggatagaaccaatacatgtattaaacaaggttgtgtttcctctggatgaataatattagtatacatgtctttagcgttggtgatcatattatatgtcattgtgatgtcaatatgtagagtaatttcccctcgatctcttattttggaattaataattatataaatgtaaaagaagcatacaatataacgtaatttatccaggttgcaaaattaataagtaaagtcgtctacttatatgtgtttaccttttggcaatttttcataatatattaatttattttgattctgtgtggtcttatctccctaatattgattgtgcaaaacaaacatttttcctctttgatataattacatgtttctcaaaccagtaatatatcattccagcagaaatatctataaaagatatttttgttgtagtccaaatagagtttaaagtaagagttaatgagggttcgagaaatttatatgataaaagacatcaggataatgatttcataatgttcaaaccaattattactagagtactactcaaataagaaacagtataatattagtaagaagtattatcattatgactaggtaagaattcatctggacaagaaagttttttatgactgacgatgagacactggttgtttggagtggtaacatatt

SEQ ID NO: 26 - DNA, 1626 bp, Kazachstania heterogenica
  source 1..1626: mol_type = genomic DNA
gataaagaaataaaagagaaaaggcagctgagagggttcgaacaggagaaaagagaatagtaatgaaagtgatgatgggagaaatatagtagtagaaaaaaggcatcagaaaggattcgaacaggggaagaggagaaggtattgatgagtgataaagaaataaaagagaaaaggcagctgaaagggttcgaacaggagaaaagagaatagtaatgaaagtgatgatgggagaaatatagtagtagaaaaaaggcagcagagagggttcgaacaggggaaaagagtgggagatagaagtgatgatgggagaaatatagtagtagaaaaaaggcatcagaaaggattcgaacggtggaagagtagaagatagagatgagtagtaaagaaataaaagagaaaaaaagcggcgatgaggattcgaacagtggaagagtaaaagatagagaagggagaaatatagtagtagaaaaaaggcatcggagaggattcgaacaggggaaaagagtgggagatagaagtgatgatgggagaaatatagtagtagaaaaaaggcatcagaaaggattcgaacggtggaagagtagaaggtattgatgagttgtaaagaaataaaagagaaaaaaagcggcgatggggattcgaacagtggaaagagtagaaagatagagaatgggagagatatagtagatagagaaaaggcatgggagaagattcgaacagaggaatagagagtaaaaaaagatgagtagtaaaagagttagataatgagagtgttggaaagtagtggtatttgtatttaatagagtgatgagttgagttattagtaaattggaagtgtggattattaaaaaggtatagatataatatagataagttgataagtttatagatggatataaagtgatggttgatatttttatttttcaaaaaagaattttgttttgaattaagattgtagaggatataaatagaagaaagtatagtgaagacagatactagaggtgggagtaagggagtgtggtgttgatataatatagtgtatgggtgtatgggtgtatgggtgtatgggtgtatgggtgtatgggtgtatgggtgtatgggtgtatgggtgtatgggtgtatgggtgtatgggtgtatgggtgtatgggtgtatgggtgtatgggtgtatgggtgtatgggtgtatgggtgtatgggtgtatgggtgtatgggtgtatgggtgtatgggtgtatgggtgtatgggtgtatgggtgtatgggtgtatgggtgtatgggtgtatgggtgtatgggtgtatgggtgtatgggtgtatgggtgtatgggtgtatgggtgtatgggtgtatgggtgtatgggtgtatgggtgtatgggtgtatgggtgtatgggtgtatgggtgtatgggtgtatgggtgtatgggtgtatgggtgtatgggtgtatgggtgtatgggtgtatgggtgtatgggtgtatgggtgtatgggtgtatgggtgtatgggtgtatgggtgtatgggtgtatgggtgtatgggtgtatgggtgtatgggtgtatgggtgtatgggtgtatgggtgtatgggtgtatgggtgtatgggtgtatgggtgtatgggtgtatgggtgtat

SEQ ID NO: 27 - DNA, 18820 bp, Kazachstania heterogenica
  source 1..18820: mol_type = genomic DNA
ggaaaagacaaaaaacaatgcaactaaagcacgcagaaagaatagaagtgactacaataacaaaaattaaaaatttgcttaaatagagagtatattctgtttatcacaccgtactcctagaattcaataactagttaatatcatttgaacttggttaagtaagtagatttttttgacaaacagttcttgacaacgctatcaataaatattctgttctagaatttatgttatgagacaggagccttctttctttttattttttattttttgttttttgtttctatcttttttctcctttccttttctttgtttacagaataaaaatgaatttgaccatgacacgaaaaaaaagaaatgacacgacacgaaaaaaaagaaatgacacgacacgaaatcgaactttcttctgctttccgatttaaaaatagaccgaacgatgaaagacaactattttttgtgtggctttgaaacattttcttggcatagtgtgttcaaaagtgtattttacatctgaatagaatgagaacagtaggtcatcagtgtatttacatacagaatgcattgtatcttttttactttttttgctaacatagtcttcaatacacatgatccaaaaaccatcgtagtattttaatatagctcttcttttttcaagaacgtaatattttgatacaaaaataaacaaaaaaaaaaaggaaaactacaaaagcaaaaataaaacggaaacgagagaagggaaatgacgcgtatctaatttggaaaaataaacaaacatcggatacgaaaaaaaacaattcagatacatttttgatgtaaacaaataagtaagctttattgacgttacctcgagaaaaataataatattatatggttaatggtgtccaggatccacaaatactaacaaaactattaataagtttattattgatatccacattacgttttcgaatgtttgtttatatcataataatacgtaccccctcttcctctatacttttttttttgaaaatatttacgcaacttattgaaactttgtttgtcattcagtttttttcatttacagaactgtttatataatactgagaatcaatctttgaaatttggtttactagaacatatatataggagtcaaatcttaaacaagttttttccctcaccttcttcttcactctttttttcctttgttacttcaaatcaatgtttaatcctttctttgctacgtgatcactaacaacccaactgtacagagttcccaaatattccaactacatactttcgctaaattattctttctcctatagatccaaacaaactcgtatatacacatatatattagtgaaaaatgcaattcaaaaatctttctttagctacccttgccatcgctactgctgtttctgctgaaggttacaccccaggtaacgtctggtccactttgactccatcaggtacttatgaatgtggtatcgttcacgctactaccactttcggtattgctgttcaaactatagcctctaccaacaagagagatattgtctcccaaattggtgatggtcaaattcaagctcctgttttatctacaaccgctgcttcttcttcttcttctgacgttaccactaccatcactaaggccattaccactacattaaaaccatcttcttctaaatcctcttccacttcttcctctaagacatcttcagtctgtaatgcctctgccaccattgctccaaagcaaactgcctgcaagaataaaggtactctacaattaactttgaaggatggtatattgactgacagcaagggcagaatcggttctattgttgccaatagacaattccaattcgatggtccaccaccacaagctggtgccatctacgctgctggttggtctatcacaccagaaggtaacttagctttaggtgacaaagatgttttctaccaatgtttatccggtgatttctacaacttatacgatgaacatattgccgaacaatgctccccaatccacttagaagttgttgaattagttgactgttaaagtcaatcgcaaaattaagaatattttctgttaaaagatattattttctttatttttaatttcatttttcttatttaataacctaactaactattcttttcttttaattatgcaaaaccagataaacactacctctttactgttgttagtttgtactattcccttgtatgcgttcgtaaatagatagactcttccctcatcgcatatatacacgtatacatgtatgtaacttagtgatacccttcaaaacaaacttctatcttatttatagtgattgatatatatatatgtatgtatatataaacataacatacatcactatacaaagtctttaaaaaaataattggaataaataaaaaaagaataaataaaagaaaagccattttcaatttttcgaacaaaaatagcatgcaagaactgaaattaaaatgattatcacgatcacttttatcgcgaaataatcactcttccatgtaagaaaaaactggaactataaacaacataatgcaaaaggaacggatgcaataaaggggctaaaagcgaaacaaaaaaagacccatgcagaatatatcatagagagtggttttggaatatctaatcaattatgaaaaaagttaaagtcacccaaagatgcttccttaacaggatactaaatcaacagcttgtaagtaaactggagaacattgttcggcaatatgttcgtcgtataagttgtagaagtctccagatagacattggtagaagacatcattgttacctaaagctaagttaccttctggtgtgatagaccaaccagcagcgtagatggcaccagcttgtggtggtggaccatcgaattggaattgtctgttggcaacaatagaaccgattctacctctgctatcggttagtataccatcctttaaggtcatagataatgtaccatcgaccttacaggaaacggctgtgacaggatcagtagatttgccactagtgacttgaccgtcaccgatttgagcagcagcagacttagtagcagcttgaacttgaccgtcaccaatttgggaagcagcagccttggtggttttggcagcttggatttgaccatcaccaatttgggaaacagcagccttagtagtcttagcagcttgaatttgaccgtcacctatttgagaaacggcagccatagtagtcttagcagcttggatttgaccatcgcctatttgagaaacagcagccatagtagtcttagcagcttggatttgaccatcgcctatttgagaaacagcagccatagtagtcttagcagcttggatttgaccatcgcctatttgagaaacggcagccatagtagtcttagcagcttggatttgaccatcgcctatttgagaaacaacagccttagtagtcttagcagcttggatttgaccgtcaccaatttgggagacagcagccttagtagtcttagcagcttggatttggccatcaccaatttgggaaactacatctctcttagcaactgaagatgtggccttggctgcagaagtggagatcctaacgacggcaataccgaaggtagaggtgtagtcagtcaaaccgccactgtaagtgccagatggggttaaagtggaccatggttcagttgggacgtaagcagccatggcagaagtagccaaggcagcagtagctaaagtttttttgtattgcattattaatattttaaatgaaattaatatgtattaatctaaacagtgttgtttccttaaaaaaaggtatgaatttgaataattgattttcttttttttttttcgaatagtatcgatttttcctatattactttttactgggtaaattgcatccaatacgacaagtaaaaggttaacggaacgacaaactagacgaaagaacactttctaaccaattttgccagtttatatattaacaaaaaaagttgaagaaaggaaaaagaaagctttttgcttatacatacatactatatgtaatatgaacttacgaatcatctacttctaattataacagtttactatttaaggtaacatctctcataattaacgtctataacaggtatgaaagtgcaatctgtagaacatttccagcctaggcaaaacgaactcctggaaagactctgttcagcggtatgacgacatctgtattctcccctcgagggggaagaaaaacacaatagcacaaagtgatatatctcctcatctggaaatatttgtccaacccacaggcccatattatttccttattcggtaatttttggttgtcttaaagatcccgaaaaggggaaaaaaatatttcaagagctaaatttagaagtcgttttttttttcataagcaagacacaaaaaaaaaatgaaaaaaaaaatgaaaaaaaaaacattgaaaagaaggaaaaggagaaaatatttatttctattaacaattataaggggaataaaccaagcatgatcactttaccataaaaggcaaaaggtaaaaaaataaaaagtgttaaaaaaagatcagactgatctaaaataaaagacagccaaaacgatcaaattaagagaagttatatgtctttggttctcaaactccattataccgcaatcctacaacaatgaacagttaaagtcaagaaaagctgtctaaatattataggcaagtaaccatgacatttggctttgctatttacactacatagagatttttcttttgtaacacttccttataatcgacactgtgtctgtaatagttagcagtggaatatattcctcaaaaaaaaaaaactgatattaaaagtaagaacttcttagtgattgggccctgacattcctctttcctgttatcttgacacctggcttgtcttccatattacaggtgacacttctaaaaggatatatgtagctctaaaatagcaacaaaaatacgattctgtaaaaattttaatccaagaacaacactttatgtgttactaatgtctatgatttgatgtaattagtgttgctttggtggaaaattgcctcgcaacattcgctctcttactcccttattatttccgagaaagaaaacaaaaaaactctccatatttttccaaatgcggtaatatttgcagaaaaccaacgatgagattttgccaaatcaggttaaaatctaaggtaggctgaattgcctaatatctttacctaaacaggaaaaaacaaaaaaaagaaaaaaagaaaaaaagaaaaaaaagaaaagtgcaagatcaaagtgaaaacttttttcttttgtttaatattgtatctccttcaatttaataaaaaacatgtataatgaaaggtgcatatatttgatattacaatgtaattgaccacaccaccagcaactactctattatggttttccattttaatacatttactatctaaaagaagaaaattaaaaatgttgtcatctgttttttttagtaatgaattagactacaattatctcatgtatcctctattgtgtgtgatgattcaatggtatatgtcattcacaaacatatataaagatagtatgttccagcagaagacacagcaatctttttgctttttcttccctatactacaactcttccgacaaaaaccagagaaaactaaacagagattttcttttaaactatatcaacacaagcatacagaaacaaaaatgcaatacaaaaaaactttagctaccgctgccttggctacttctgccatggctgcttacgtcccaactgaaccatggtccactttaaccccatctggcacttacagtggcggtttgactgactacgcttccaccttcggtattgccgtcgttggaatctccactcctgcagctaaggccacatcttcagttgctaagagagatgtagtttcccaaattggtgacggtcaaatccaagctgctactgccaccaaggctgctgtttcccaaattggtgacggtcaaatccaagctgctaagactactaaggctgctgtctctcaaataggtgacggtcaaattcaagctgctaagactactaaggctgctgtttcccaaattggtgatggtcaaatccaagctgccaaaaccaccaaggctgctgtctctcaaataggtgacggtcaaattcaagctgctaagactactaaggctgctgtttcccaaattggtgatggtcaaatccaagctgccaaaaccaccaaggctgctgcttcccaaattggtgacggtcaagttcaagctgctactaagtctgctgctgctcaaatcggtgacggtcaagtcactagtggcaaatctactgatcctgtcacagccgtttcctgtaaggtcgatggtacattatctatgaccttaaaggatggtatactaaccgatagcagaggtagaatcggttctattgttgccaacagacaattccaattcgatggtccaccaccacaagctggtgccatctacgctgctggttggtctatcacaccagaaggtaacttagctttaggtaacaatgatgtcttctaccaatgtctatctggagacttctacaacttatacgacgaatcaattggtgctcaatgtcatccagtttacttacaagctattgacttggtatcctgttaattgcattctttccaaaaagaaaataagcattaatctaaacttattataattttcattttgcattatatattactagttcgttcatgttgctattttattattttttcttcgaaatttcccaatgttgcaaacattgtttttagttcttaaagttttgaatgttttaaattcagatgctttcatgttttatgttttttatttaattcttatatattatttgtacacttagtcatgatacatccaataaataatgttctaaaatcataaaatatatttcagtctggaaacctgacctattatttcaactggagagtggaagctacttgcatctctagatcattagtgtttacacctttagcttacatgttcatttttcttacattagaattttgcgttttatatgacgaaaaaattactccagaaaaattttgaactgtcaaggttataaaaacataaatatataatttatatgtgtaataagaaaacttgttattggtaaacatgatacattcctttcctagaaatcaccaaaaaagtgcaaatacgatagaattaaccaaatcagtatggtatggaacagaaatagaacttcccttttaataattggggtcctttttcatctcttttatctatggtcaatatttgatatatactttgtatcacccttggttcacggaatgtcccaataccgtagtacaaacaatccacctgctaaaagattgtttttaattgtaggtgatggattgagggcagacaccacttttgataaaatcacacatccagtatcaggtgaaacgaactttctggcaccttttattagatctattgtcgaaaataatggaacttatggaatatcacatacaagaatgcccacagagtcacgtccaggccacgttgctatgattgcagggttttatgaagatgttagtgcggttacgaaaggttggaaggaaaaccctgtcgattttgatagtttttttaatcagtctacccatacatactcttttggatcccctgatattttaccaatgtttaaagatggagcttctgatccaaatcgtatagatacctggatgtatggtcatgaatttgaagattttactcaatcttcaatagaattagatgcctatgtttttaaacatttgtattctttattcaataatgctactataaatagtacacttaatactgaaataagacaacaagggaatgtctttttcttacacctattaggttgcgatactgctggccattcttatagaccatattctgcggaatattatgacaacgtgaagtatattgacactgaaatttcaaaattagttgaaaaagttaaagatttttttggtgatgaagatactgcgtatatttttacggctgatcatggtatgagtgcctttggttctcatggcgatggccatcctaataatactagaactccacttgtagcatggggtgctggtttaaataaacccaagaggaataatgttccggttttcgataattatactaaatcatgggagttaggtcatattgtaagaaatgatgttaaacaagctgatattgcatcattgatggcttatctaattggtgtgaactatcctgccaactctgttggggaactgccactatcttacattgatggagatgaagataacaaattaaaagcattatacaacaatactaaagctattctagaacaatacgttgtgaaaagagaagaagttaagaattctcagtttgtatttaaagattatcataaatttgttgaaaaaccttttgaagatcatttagatgaaattcattctattatcgatcgaattgctaaaggagaaattgatttagaagaacaagctatttctatgattgaaaatcttatgacaaccacactggaggcactacattacttaaccacatacaactggagattaattagaacaattgtcacattaggatttattggatggattgttttctcattcagtatattcttaaagttatttattattcctagtcatcaaaacattaaaggaagaatcacactattaaatttaacctttttcactttggttagtttatgcttaaactgggtcttatactaccaacgttctccattcaatttctacatgtacttactattcccactatatctatggtgtcaaattgttgctaatcgatatgtgttacaaataggtatcaaagaattattccgtggaatttctgtattagaaagaattacaattgctttcttaatagtaatgatctatgaagggattgtatatggatttttccatcgatggatttttagtataatatttattttatttgcaatatatccaacagtatgtggattgcaaactaatttgctaaaaaccttagcctggtgttttacatgtatttttatgtctactttcacattatatgatgcagttaaaatagaagatctgacccaaattaattatgctggctatttaattattattagttcattttatggattgaaaaaagttaacaaaagcatttcatctaatacaagaacaatacttttagttcaaatgctattagcaatcttaatgttaattgtgactaataaatcagttgtatctttacaaaaaagagaaggtttaccatacagtgcccaaatctcaggttggtctttattaataatttctttatttataacaccatttttccattatttaacacctagtaataactatagagtcagattattaatcatttatctaacatttgcacctacatttattatattgacaatatcatttgaattattgttttatgtgtttttcacagcctttgttgttcaatggattgaaattgaatcaagcttaaaacaacaaagtgtaaaagacaactggttgcaattgctaagagtttcagtaattggatttttcttattacaagtagcattctttggttgtggtaatgttgcatcaatatcatctttttccttagattcagtttacaggttattaccaatatttgacccattccccatgggtgcattattaatgttaaaattaattattccatatattatattatcatgtggattaggtatacttaatatgaaattaactataaaggattacacaatatctacattaattatatcaacaagtgatatattgtcattaaatttcttctatttattgaagacggagggatcatggttagacattggtatcaccatatctaactattgtttagctatattgtcatctttgttcatgttagtattagaaatggttagtcatattttactaagaaatgtgacaatagaagcgactccactggaggatatcgaaaagaaggaaaaataacgataaaaataaatataatagatagtatatatatttttattaaatcataaactaatcacaattataactaaattattatatatcttacctaatggtaagattctatttgatcagaatatgtaaacatttattagatgtgagtcaagtttgtagagcgagaattaaagtttggtgagtctttatttttttataaaaaaaaaaacataagtaagaatcaaaaaataatatgtatacatatatataaacaatatgttaaatcctagaaaaaccaagatcacataaaaaaaagagactttcttttaggttccagaaaattgcagtaatttattatatttaatccttttttttttcctaagaaatattgttcagtgtacataactgctgaaacaaatagaaaaatatttatctggcgattatttttttagatctgttttataaaattttgcaagtatttataatatttgaaaaaaaaaaaaaataaaaaaaataaaaaaacttaatatagtttctttatctttgtcaactaatatttcgtggatgtcataaatattagtcataatagatgacaaaaatggtgatattatttcagttttggtatataattatggtggtgtagctgaatagctttatggctcaaaatatttttgtgcatatacgcaataggaaagctatttgctaagataaattccattttatattcatatgttgattataaaaaaaagtgctaaagacttaaaatcttccacttttacaattcaaatttcttagaactcccagaagcacatatgtcactgaaggttgctgattgattcttctcctctctttgtaattatatggttttgttgaaatagaatgttctataataaaatagatagaacaataagattttagcagacactaaacgataaattgttgagtaataattgttgagaggtcaccaaaagttgttgagtttttttattaaatatcttactgttcgtagaggaaaatggcttaatgttaacatatataaagccaaagatttcatcatacattatttttatcttatttgcaatctttgtatattactatttctatgttgtatatagagagagaaagtgaagaactttattataattttgtatactaaatctgtttaatataatattgagaatgtttactatatatccaatgaataaaggcgctcattctcaacaggtttgtctttcaatttgaaccaatgttgacacatttattctgcaaatgttccttataaataacaataaaacaaagaatcttgcagacaaacacaatggaaattgaagggaaaacaaccgaaaacaaaaaaaagaaactcaattaactgcttttatcattcaatacgatattttgggttgtttctgtttttttttttttttttttttttttttaattttttcctttccctccagttctgtcaatcgtctctttattatagccgttatagattgagaaagaggctttcttgttataaaggcagcctgcttttagacaggggaaaaataagaaataataaaacaaacaaaacaaggaaatagggacatctagaaggatgatgtaagatttagactagattggggttagcataaaccatcttaaaactatgtattcaaatatgaacacacatacattcatgcatatatatattcattttcttacgacatttatacgatattatatagaaataaaaggtttcaaaataacaaataaataaaaaaaggtttataatagtgttgtatccaacaatttagattttctataattgtagtgcaggcaatttcagatatagatacaaaaaacatcatagtaatttgatattatcctaatttatctatctatccatctatctttatattctgttagttaagtttcaatataaaaaaaaaatcaaatatcttgtataatcatttaagtaagtaaatttacagatatatatttttgacatgacctatataacgaaggataatacttcactaagtcaaaacttaattaataactcgtttcaaaaaatattgaaaatattagagtagaagaaacactagaagaagaagacgaagaagtcgttacattacagcgattaactgaagaaataaagcatcatcataaagataaatgtatttttagaagaccgagcttatttatattatccatattagtatttttatttggatttagtgaaatgttatatttaacaccgtttatcacattaacaataaacaagatttgccgtggtattcatgcaaatttatgtgattcaaaagaagttcaaatgtacatgtctcaaattggatcaactactttaatatattcaggtataatcagtaccttaatgagtggaaaatggggtcggtggtccgatcactatggtagagttaaaatattcggctatatggggttaataagagtaataggtaatctattacatttgctggctttatcttcatatgtaccattcaataaatggttaattattctttctgccactgtaaattcaattagcgggggtatgtttgcattttttggtaatgcaaatagttatataaatgatattgtggaacctgaggatagaatattttcaatcagttttgtcaccagtcttatgcagataactacagggattggaccattaacaggatctcttttagttaaatggtataatggaaatgattcggtacccatctatgttgctattgcagccggtattctattcatagttttatgttttactataataatagaaccacgtcataatctatggttagaatacaccagagaacaatttactatcaaacaaatggagttatatcaagaatttaacaatgacattaccaactcttcttctactttatggttcaaagctcaaagatatggtaaatatcatctaataaaattagtagatttcttggaacccttcaaacaattttggttaaaggataaaccttcctcagtgaaatggaatgttttattgttagttactattgatattctttttggatcagttatgatgggaataatgcctagttttttattattttgtacatacaaatatcattggaaaagtgtggaattaggctacttcatatccttctgtggcatagcaaatggcataacattatttttatcgtcacattatggtatgaacttaatgaaaaatgtaattaaaacaaatccaaataatgtggataaactagataaagtttctattggcatgtctttgatatttttaactgttagcaacttttttatgataagattctccaactattcaaaaatcatcataatctttgtcattttaagaagtctatcaaagatatgcagtccaattgctgaagcagcaattatgaaacattataagaaaacaggaaagagtacaggtcaagtgtttggtgccattgcattgctgaattctttatccatgttaattgtgccaccaatactactaagaatatacggatttactattagtataggaccagaattgtttttgtatttccctttaacctgttgcctaattgcacttataaattgctattttttaagtgtcaatgctccaattgagagctcaaatcttatgagatcctcaactccactttatggaacggaaggttaattaattaattcattcactcattaattcattcactattagcatcgcttttgtttctatcttttgtccatgtgttcctcttctcctttatttttttactttttatttatttatttatttaatgcatccaatacagtaattcaacattatccccaatagaatcgacgttatcaggcaagttgaaaagaaaaaaggaaaaaaaaaagataaaacaaaaaaaaaacaaacctagccttcttctattttctgtatttccaattagcataaacaagtaatagatgatgttgataaaatgaaaatagacaagaaaattcacatcacagaataataataatcaaataaaaaaaagaaactaaactttgtttaaatttgttgccttttcttttcatttcttttttttaattttttttccttcaatttgctttcgtttctttttctttatattaaaaaattcagaagtaagaaaagtccaaggcttttaaggctagtatctcatactgttgcaataaacgcttatagactagacgaatcatagtcaccatacattatatattagtaaggaccgttaaaacattatcgataagataagataaacttaagattgctaaataagttagtgaactttcccaaaaaaatttttttccctcccccttattttcaactacttttgtgtaaaatgtatgtggacccacagaggaataaccaggtacggcgattgactttaaatattacacccaaggaagaattatcttatcatagaccaagacctgcgaatgaaaatgctataatgtctaatagagaacaatctccacaattggatattgccaactctacttctccagtatactcaattcctaaagatgaaatacagattttaaaggagcgtcaagcgaaagaaaaagaagaagaagaggtagtagtagaaaggcaacatgaaaagagtttacaagtggatagccaaaatttatccatcataaaggaattggaaaccggaagcactgctgttactactaccgctgcagcagtagtttctaataataataatcataaccataatcataatcatcatcataataataataataatataacacagaataccgctggtgatgataaatctttattcaattctgtacaggaacctttaacagttaagggaatagaacatgatatgttattacatggtaaaaagacctctgggaaatatactttccaagattttcaaatattaaggactttaggtactggatcttttggtagggtccatttaattcgatcaaatcataatggtagattttatgcattaaaagttttaaaaaagaaaacaattgtaaaatttaaacaggttgaacacacaaatgatgaaagaaaaattttatcaataatatcacacccctttttaatacgaatgtgggggacattccaagattcgcagcaaatttacatggtaatggattttattgaaggtggagaattattttctctattaagaaaatcaaaaagatttccaaacccagttgccaaattttatgctgcagaaatatgtcttgctttagaatacttacatgatttggaaattatttatagagatttaaagccagaaaatattttacttgataggaatggccatattaaaataacagattttggttttgcaaaatacgttcctgatgtgacatataccttatgtggaacaccagattacattgctccagaagttgtcagtacgaagccttataataaatctgtagattggtggtcatttggtataataatatatgaaatgttagctggttatacccctttttatgattctaacactattaaaatatatgagaaaatattgaatgccccattgaaatttccagaatactttgattccttagtgcaggatttattgagagggttaatcaacagaaatttaagtcaaagattaggcaatttgcaaggtggtactgaagatgttaaaaaccatccatggtttgaagaggttgtttgggataaaatattagcaagatgtattgaaacaccatacgaaccaccaataagacatggacaaggtgattcatctcagtttgatagataccctgaagaggaacttcactatggttttcaaggtgaagatccgtatcatgatttatttaaagcgttttagttttgttgaggtttgcattgaatattttttgatctacttttattttattttattttatttttgttaaaatgcatttggccatacatagcctattttctttgtttttacttctaaaaagaagtatctctatatctattatttatcctttccttcatctgcacgtgcgatatttctctcactttactagtattattattttaatactagatttacatcaactatttaaattttttttgtcaattttgacttttctcctaagataaatctattttgtttctaatttatataacttaacataatttatacagcatattcatagactatattaacgaattaaataatataatgcaacttgtcttgctaaaccattcttttcttcctcttttattccattagaatctgaaaatatatattttttgttcttttttcttttttttttttaattttgtgaactttttatcaaaggttgattcaattcccgattaaacaaggaaaattcaactgaaatgtacaaatgtaaaacgtatatatcaagggagaatgataacaaacacagctttgatttcacatttttgctagctattattcttagttttcattaaatctagtcaaaattttgtctaggtaattgaggtaattccatcaagagaaaaaaataaacaatagaaaaagacacttataaaatatggccggaaagtcaagagtcgttaagcaactatcaatattagacaaattaacttttactacaaagaaaccacaaataataataaatcccactaagtaccaatctttaaaattaaccttccaagtacagaatcacaatggacacatgggtgcacgtaaattttggcgtgaatatttacctacattaaaattttacaacccaaactttgatatgaatgtcactagaatcaaaaatgatgataagttagtacaagtaccctgcgtattagagatcttggatgaacaggggaaatctttggaaacaattaatatgaaaaacaaaagatctgaagatatcatggatgagtttttaagtaagattgactatgaagtaataagtgaggataagttaataaaattcagtaaatagtctaagtaaaatacttccttcagaattaatttttgttttggcctttatttttattgccaaaacaaatagcatatgtacaagttttatatatataacacccacatttttctgtaaataaccacattaatttttttcctttttctattttttttattttggttttgttgttcaatattatcttctttaatcaacaatgttcttatacttcatcacctcaaggattagcattttaattattggttttgtttattttatatatatgttataaggcagatatttgatgtattatttgtggtaaaatcaatcatatctcaataggaaaagacttttaatataatagtgcttaccttaaacgttggtattgttctaaaagactacttgagagtaaaaacattgccattagaactactgatttgcctctactagtagaatgtatctaataaaatatatgttaattattacacaatgtagtaactaatgattacaatagcatacttcaatctatgagcttaatatagtgtaattggtgacaaagtttgcgaggtaattattgatgaattggcaaaataaaaacaaaattaagattaatatgtgaaaactcaaaattattataatgacattgttactgagaaagggtaggttaggtggaggttaagttgtaaagaaaattggcataacgttagcaaatagttattatatgtgatgtcaaataatcctaaagatatagattgatagtattattcaggaatgaaactatattagtagtgctttccaacagtagcaacacaatagtagttaaagcatatcatgactatattgaaatggattaaagtatagtaagataatgagataattcgaatgtgtatggatagaaaaaaaatctattgggaagatctatacaaagaccttagacaaatataattagtatgaaaacaataagttatacacatcttgggagataatcttgtacaacagaatcaatgttcaatattatttgtaatcgtgtaaaaacgtcccgatacggagctttcttaaagagaaactatccaactcttgtgaccctttcagttttatgggaacttcgtattacattcttttatatgtcttatatgtagaaaaagtaagctaaacatatggttttaatctgtataactccttaatacaaatttttaatatttttcgagagtaaatgcatcttgcaaaaccattgtcagtatgttatatgttagtaatttcgacgtataacgtaatttttttctttgtttaagatgaagacttatttagatataagaattttgtttggaaataaattagtataattcttaccacacatgagcagttaacagtatagcttagaataatagttcaatattattcttagttgttacagtgttaaaccataactatgggtactgattattaagttgcagctgtgtagaaattacgttaagataactgaaaattgtttgattacaattagcacaggctataccacaggtttggttaacgatgttgtcaatgagtgttaaaacaaatatctatgtttatttcatagacaaattctgaatgttcttattgaaccatacgctaccataggcattatcaattaaatgttagtttaaactgattatagtaaacatgacaatgtagcttaccgtagaagtcttcagtctaactgatttaaagacaaaaaaagtgaactagaatgtttcagaaatcattataacaacaagattagtatagagggattcacatagaatatcattcacactagtgaaaatgtttgatagtagaagatgtaatcagatatatactgaattttaattttgatacaggatttcaatatcaaaaactctattaatattcatcatgttaataatatgctaaaataagataaacctataatcggatgttggtggtaatgtaagttctcagctatttatagcataatattaatgatgttagagat

SEQ ID NO: 28 - DNA, 740 bp, Kazachstania heterogenica
  source 1..740: mol_type = genomic DNA
tgttgaaatagaatgttctataatgaaatagatagaacaataagattttaacagacactaaatgataaattgttgagtaataatcgttgagaggccaccaaaggttgttgagtttgtttaataaatatcttactgttcgtagaggaaagtggctgaatgttaacatatataaagccaaggatttcattatacattatttttatcttatttacaatctttgtgtattattacttccatgttgtatatagagaaagaaagtgaagaactttattataattttgtgtactaaatctgtttaatataatattgaaaatgtttactatatatccaatgaataaaggcgctcattctcaacagtataatacagaaattgttaacactcaacaacaaataatggagttataaaaccacaataatttaactgaacattaataaataatccatatatactaacataatgaaagtttaataaactagcatagcaaagaacactttaaacagacttctacccagagaacttgaaatgctaatgtacttcatttaatagttgaactatgataatatctaagaaggtatattgatattttaaaaacacaacatatattatcacactatgaatatattgagatatcatgtttaatactttttaaagatggtaggttactaccactattatataacatatcataaaaggacaaaaataactattttcaattgttcatcatgagcatacaccaatc

SEQ ID NO: 29 - DNA, 18 bp, synthetic construct
  source 1..18: mol_type = other DNA
ggtgttgagcaatacgac

SEQ ID NO: 30 - DNA, 17 bp, synthetic construct
  source 1..17: mol_type = other DNA
agacctaagccattgtc

SEQ ID NO: 31 - DNA, 20 bp, synthetic construct
  source 1..20: mol_type = other DNA
atgcacgtttttctgggtgc

SEQ ID NO: 32 - DNA, 20 bp, synthetic construct
  source 1..20: mol_type = other DNA
gtatcgcatttcgctgcgtt

SEQ ID NO: 33 - DNA, 21 bp, synthetic construct
  source 1..21: mol_type = other DNA
gtgaatcatcgaatctttgaa

SEQ ID NO: 34 - DNA, 41 bp, synthetic construct
  source 1..41: mol_type = other DNA
agacgtgtgctcttccgatcttcctccgcttattgatatgc

SEQ ID NO: 35 - DNA, 79 bp, synthetic construct
  source 1..79: mol_type = other DNA
aatgatacggcgaccaccgagatctacactctttccctacacgacgctcttccgatctgtgaatcatcgaatctttgaa

SEQ ID NO: 36 - DNA, 65 bp, synthetic construct
  source 1..65: mol_type = other DNA
caagcagaagacggcatacgagatnnnnnnnntgactggagttcagacgtgtgctcttccgatct

SEQ ID NO: 37 - DNA, 441 bp, synthetic construct
  source 1..441: mol_type = other DNA
atggctaacttggacgaaatgttgcaaactaccgttgaagaagtcagacaattcttgcaagttaatcgtgtcttggtgttccaatttgaagaggattattccggtgttgttgttgtcgaagctgttgatgatagatggcaatctattttgggtactcaagtcagagacaggtacttcatggaaactagaggtgaagaatactcccatggtagatatcaagctattgccgatatctacactgctaacttgactgaatgctacagagagttgttggaacaatttcaagttagagccattttggccgttccaatcttgcaaggtaatcaattgtggggtttgttgattgcccatcaattgtctgctccaagacaatggcaaccatgggaaattgatttcttgcaacaaattgctacccaattggccattgctattcaacaagct
